(19) United States
(12) Patent Application Publication
(10) Pub. No.: US 2010/0248390 A1
(43) Pub. Date: Sep. 30, 2010

(54) COMPOSITIONS AND METHODS FOR IDENTIFYING LIGANDS OF ODORANT RECEPTORS

(75) Inventors: Hiroaki Matsunami, Durham, NC (US); Joel D. Mainland, Durham, NC (US)

Correspondence Address: Casimir Jones, S.C., 2275 DEMING WAY, SUITE 310, MIDDLETON, WI, 53562, US

(73) Assignee: DUKE UNIVERSITY, Durham, NC (US)

(21) Appl. No.: 12/715,528

(22) Filed: Mar. 2, 2010

Related U.S. Application Data
(60) Provisional application No. 61/156,703, filed on Mar. 2, 2009.

(51) Int. Cl. G01N 33/566; G06F 19/00

(52) U.S. Cl. 436/501; 702/19

(57) ABSTRACT

The present invention relates to compositions and methods for identifying odorant-odorant receptor interactions. In particular, the present invention relates to in silico methods for identifying odorant receptor-odorant interactions based on chemical and physical properties of odorant receptors and odorants.

### CROSS REFERENCE TO RELATED APPLICATIONS

[0001] This application claims priority to provisional application 61/156,703, filed Mar. 2, 2009, which is herein incorporated by reference in its entirety.

### STATEMENT REGARDING FEDERALLY SPONSORED RESEARCH OR DEVELOPMENT

[0002] This invention was made with government support under Grant No. DC005782 awarded by the National Institutes of Health. The government has certain rights in the invention.

### FIELD OF THE INVENTION

[0003] The present invention relates to compositions and methods for identifying odorant-odorant receptor interactions. In particular, the present invention relates to in silico methods for identifying odorant receptor-odorant interactions based on chemical and physical properties of odorant receptors and odorants.

### BACKGROUND OF THE INVENTION

[0004] Olfactory dysfunction arises from a variety of causes and profoundly influences a patient's quality of life. Approximately 2 million Americans experience some type of olfactory dysfunction. Studies show that olfactory dysfunction affects at least 1% of the population under the age of 65 years, and well over 50% of the population older than 65 years. The sense of smell determines the flavor of foods and beverages and serves as an early warning system for the detection of environmental hazards, such as spoiled food, leaking natural gas, smoke, or airborne pollutants. The losses or distortions of smell sensation can adversely influence food preference, food intake and appetite.

[0005] Olfactory disorders are classified as follows: 1) anosmia: inability to detect qualitative olfactory sensations (e.g., absence of smell function), 2) partial anosmia: ability to perceive some, but not all, odorants, 3) hyposmia or microsmia: decreased sensitivity to odorants, 4) hyperosmia: abnormally acute smell function, 5) dysosmia (cacosmia or parosmia): distorted or perverted smell perception or odorant stimulation, 6) phantosmia: dysosmic sensation perceived in the absence of an odor stimulus (a.k.a. olfactory hallucination), and 7) olfactory agnosia: inability to recognize an odor sensation.

[0006] Olfactory dysfunction is further classified as 1) conductive or transport impairments from obstruction of nasal passages (e.g., chronic nasal inflammation, polyposis, etc.), 2) sensorineural impairments from damage to neuroepithelium (e.g., viral infection, airborne toxins, etc.), 3) central olfactory neural impairment from central nervous system damage (e.g., tumors, masses impacting on olfactory tract, neurodegenerative disorders, etc.). These categories are not mutually exclusive. For example, viruses can cause damage to the olfactory neuroepithelium and they may also be transported into the central nervous system via the olfactory nerve causing damage to the central elements of the olfactory system.

[0007] Smelling abilities are initially determined by neurons in the olfactory epithelium, the olfactory sensory neurons (hereinafter “olfactory neurons). In olfactory neurons, odorant receptor (hereinafter “OR”) proteins, members of the G-protein coupled receptor (hereinafter “GPCR”) superfamily, are synthesized in the endoplasmic reticulum, transported, and eventually concentrated at the cell surface membrane of the cilia at the tip of the dendrite. Considering that ORs have roles in target recognition of developing olfactory axons, OR proteins are also present at axon terminals (see, e.g., Mombaerts, P., (1996) Cell 87, 675-686; Wang, F., et al. (1998) Cell 93, 47-60; each herein incorporated by reference in their entireties). In rodents, odorants are transduced by as many as 1000 different ORs encoded by a multigene family (see, e.g., Axel, R. (1995) Sci Am 1273, 154-159; Buck, L., and Axel, R. (1991) Cell 65, 175-187; Firestein, S. (2001) Nature 413, 211-218; Mombaerts, P. (1999) Annu Rev Neurosci 22, 487-509; Young, J. M., et al., (2002) Hum Mol Genet 11, 535-546; Zhang, X., and Firestein, S. (2002) Nat Neurosci 5, 124-133; each herein incorporated by reference in their entirety). Each olfactory neuron expresses only one type of the OR, forming the cellular basis of odorant discrimination by olfactory neurons (see, e.g., Lewcock, J. W., and Reed, R. R. (2004) Proc Natl Acad Sci USA; Malnic, B., et al., (1999) Cell 96, 713-723; Serizawa, S., et al., (2003) Science 302, 2088-2094; each herein incorporated by reference in their entirety).

[0008] What is needed is a better understanding of olfactory sensation. What is further needed is a better understanding of odorant receptor function and odorant receptor-odorant interactions.

### SUMMARY OF THE INVENTION

[0009] The present invention relates to compositions and methods for identifying odorant-odorant receptor interactions. In particular, the present invention relates to in silico methods for identifying odorant receptor-odorant interactions based on chemical and physical properties of odorant receptors and odorants.

[0010] For example, in some embodiments, the present invention provides methods and systems for method of identifying an odorant ligand for an odorant receptor, comprising comparing three or more amino acid property descriptors of an odorant receptor with three or more physicochemical properties of a plurality of odorants; and identifying one or more odorant receptor for the odorant receptor based on the comparing.

[0011] In further embodiments, the present invention provides methods and systems for identifying an odorant receptor for an odorant, comprising comparing one or more (e.g., two or more, three or more, five, ten, fifteen, twenty-five, fifty, one hundred, one thousand, etc.) amino acid property descriptors of a plurality of odorant receptors with one or more (e.g., two or more, three or more, five, ten, fifteen, twenty-five, fifty, one hundred, one thousand, etc.) physicochemical properties of an odorant; and identifying one or more odorants receptors for the odorant based on the comparing.

[0012] In some embodiments, the physicochemical properties are selected from, for example, Harary H index, topological polar surface area using N, O polar contributions, leverage-weighted autocorrelation of lag 0/weighted by atomic polarizabilities, R autocorrelation of lag 6/weighted by atomic polarizabilities, topological polar surface area using N, O, S, P polar contributions, Radial Distribution Function—11.0/weighted by atomic masses, valence connectivity index chi-2, phenol/enol/carboxyl OH, R autocorrelation of lag 2/weighted by atomic Sanderson electronegativities, R maximal autocorrelation of lag 4/weighted by atomic masses, graph vertex complexity index, Geary autocorrelation—lag 1/weighted by atomic masses, Ha attached to C3(sp3)/C2(sp2)/C3(sp2)/C3(sp), molecular path count of order 04, leverage-weighted autocorrelation of lag 2/unweighted, hydrophilic factor, 2st component symmetry directional WHIM index/weighted by atomic van der Waals volumes, or R maximal index/weighted by atomic polarizabilities. In some embodiments, all of the physiochemical properties are compared. In some embodiments, the amino acid property descriptors are selected from, for example, volume, composition and polarity. In some embodiments, the amino acid property descriptors are compared at specific positions in an alignment of known odorant receptor sequences (e.g., those described in Table 6). In some embodiments, systems and/or methods are performed in silico. In some embodiments, the results of the comparing are displayed on a computer screen. In some embodiments, methods further comprise the step of screening odorants identified in the method using an in vitro assay. In some embodiments, systems are accessed by users within a web-based platform via a web browser across the Internet or as a software package used as a stand-alone system on a single computer.

### DESCRIPTION OF THE FIGURES

[0013] FIG. 1 shows EC50 values for 62 odorant receptors and 63 odorants.

[0014] FIG. 2 shows bias in odorant and receptor sampling. (A) Odorant space. (B) Receptor space.

[0015] FIG. 3 shows that distance in odorant space predicts similarity in receptor response. (A) Testing various odorant-similarity metrics against the functional data. (B) The difference in the receptor response profile is correlated with the distance between the two odorants calculated using 20 optimized descriptors (r=0.79, p<0.001). (C) 18 physicochemical descriptors that explain over 62% of the variance in the dataset. (D) The top ten most similar odorant pairs according to the assay.

[0016] FIG. 4 shows that distance in receptor space predicts similarity in responses to odorants. (A) Testing various receptor-similarity metrics against the functional data shows that that the optimized descriptors predict functional responses better than full-sequence similarity or similarity at previously suggested residues. (B) Differences in the odorant response profiles of two receptors are correlated with distances between the same receptors, calculated using 16 optimized descriptors (r=0.73, p<0.001). (C) Snake plot of a typical OR in which amino acid residues with ligand-specificity-determining properties are highlighted.

[0017] FIG. 5 shows the breadth of tuning in odorant space. A) Table of assorted breadth of tuning representations. B) A histogram of the hypersphere radius measure for all 62 receptors.

[0018] FIG. 6 shows responses of olfactory receptors to enantiomeric pairs.

[0019] FIG. 7 shows receptor comparisons by classification. Breadth of tuning did not differ between Class I and Class II receptors by either (A) number of agonists or (B) coverage of odorant space. (C) Sensitivity did not differ between Class I and Class II receptors. Breadth of tuning did not differ between human and mouse receptors by either (D) number of agonists or (E) distance in odorant space. (F) Human receptors were significantly more sensitive to odorants than mouse receptors (p<0.008).

[0020] FIG. 8 shows receiver operating characteristic curves for the ligand-receptor interaction classifier. (A) Validation of the model when predicting the response of novel receptors to tested odorants. (B) Validation of the model when predicting the response of tested receptors to novel odorants.

[0021] FIG. 9 shows dose response curves for all 340 odorant/receptor interactions.

[0022] FIG. 10 shows odorant clustering based on receptor response.

[0023] FIG. 11 shows receptor clustering based on response to odorants.

[0024] FIG. 12 shows an outline of the screening procedure used in embodiments of the present invention.

[0025] FIG. 13 shows a phylogenetic tree of all 464 receptors and 1425 mouse and human odorant receptors.

[0026] FIG. 14 shows sensitivity tuning curves.

[0027] FIG. 15 shows one dimensional tuning curves.

[0028] FIG. 16 shows two-dimensional tuning curves.

[0029] FIG. 17 shows a snake plot of a typical OR.

[0030] FIG. 18 shows EC50 values for 62 odorant receptors and 63 odorants.

[0031] FIG. 19 shows Table 2.

[0032] FIG. 20 shows PCA analysis of odorant models of exemplary embodiments of the present invention.

[0033] FIG. 21 shows ROC for predicting the response to 6 odorants.

### DEFINITIONS

[0034] To facilitate understanding of the invention, a number of terms are defined below.

[0035] As used herein, the term “amino acid property descriptors” refers to amino acid properties of odorant receptors that are useful in determining interactions of odorant receptors with odorants. In some embodiments, the descriptors include, but are not limited to, volume, composition and polarity. In some embodiments, the amino acid property descriptors are compared at specific positions in an alignment of known odorant receptor sequences (e.g., those described in Example 1 and Table 6).

[0036] As used herein, the term “physiochemical properties” refers to properties of odorants that are useful in determining interactions of odorants with odorant receptors. Examples of physiochemical properties that find use in identifying odorant receptors that are likely to interact with a given odorant include, but are not limited to, Harary H index, topological polar surface area using N, O polar contributions, leverage-weighted autocorrelation of lag 0/weighted by atomic polarizabilities, R autocorrelation of lag 6/weighted by atomic polarizabilities, topological polar surface area using N, O, S, P polar contributions, Radial Distribution Function—11.0/weighted by atomic masses, valence connectivity index chi-2, phenol/enol/carboxyl OH, R autocorrelation of lag 2/weighted by atomic Sanderson electronegativities, R maximal autocorrelation of lag 4/weighted by atomic masses, graph vertex complexity index, Geary autocorrelation—lag 1/weighted by atomic masses, Ha attached to C3(sp3)/C2(sp2)/C3(sp2)/C3(sp), molecular path count of order 04, leverage-weighted autocorrelation of lag 2/unweighted, hydrophilic factor, 2st component symmetry directional WHIM index/weighted by atomic van der Waals volumes, and R maximal index/weighted by atomic polarizabilities.

[0037] As used herein, the term “odorant receptor” refers to odorant receptors generated from olfactory sensory neurons.

[0038] As used herein, the term “odorant receptor cell surface localization” or equivalent terms refer to the molecular transport of an odorant receptor to a cell surface membrane. Examples of cell surface localization includes, but is not limited to, localization to cilia at the tip of a dendrite, and localization to an axon terminal.

[0039] As used herein, the term “odorant receptor functional expression” or equivalent terms, refer to an odorant receptor's ability to interact with an odorant receptor ligand (e.g., an odiferous molecule).

[0040] As used herein, the term “olfactory disorder,” “olfactory dysfunction,” “olfactory disease” or similar term refers to a disorder, dysfunction or disease resulting in a diminished olfactory sensation (e.g., smell aberration). Examples of olfactory disorders, dysfunctions and/or diseases include, but are not limited to, head trauma, upper respiratory infections, tumors of the anterior cranial fossa, Kallmann syndrome, Foster Kennedy syndrome, Parkinson's disease, Alzheimer's disease, Huntington chorea, and exposure to toxic chemicals or infections. Diminished olfactory sensation is classified as anosmia—absence of smell sensation; hyposmia—decreased smell sensation; dysosmia—distortion of smell sensation; cacosmia—sensation of a bad or foul smell; and parosmia—sensation of smell in the absence of appropriate stimulus.

[0041] As used herein, the terms “subject” and “patient” refer to any animal, such as a mammal like a dog, mouse, rat, pig, cat, bird, livestock, and preferably a human. Specific examples of “subjects” and “patients” include, but are not limited to, individuals with an olfactory disorder, and individuals with olfactory disorder-related characteristics or symptoms.

[0042] As used herein, the phrase “symptoms of an olfactory disorder” and “characteristics of an olfactory disorder” include, but are not limited to, a diminished olfactory sensation (e.g., smell aberration).

[0043] The phrase “under conditions such that the symptoms are reduced” refers to any degree of qualitative or quantitative reduction in detectable symptoms of olfactory disorders, including but not limited to, a detectable impact on the rate of recovery from disease, or the reduction of at least one symptom of an olfactory disorder.

[0044] The term “gene” refers to a nucleic acid (e.g., DNA) sequence that comprises coding sequences necessary for the production of a polypeptide, RNA (e.g., including but not limited to, mRNA, tRNA and rRNA) or precursor. The polypeptide, RNA, or precursor can be encoded by a full length coding sequence or by any portion of the coding sequence so long as the desired activity or functional properties (e.g., enzymatic activity, ligand binding, signal transduction, etc.) of the full-length or fragment are retained. The term also encompasses the coding region of a structural gene and the sequences located adjacent to the coding region on both the 5′ and 3′ ends for a distance of about 1 kb on either end such that the gene corresponds to the length of the full-length mRNA. The sequences that are located 5′ of the coding region and which are present on the mRNA are referred to as 5′ untranslated sequences. The sequences that are located 3′ or downstream of the coding region and that are present on the mRNA are referred to as 3′ untranslated sequences. The term “gene” encompasses both cDNA and genomic forms of a gene. A genomic form or clone of a gene contains the coding region interrupted with non-coding sequences termed “introns” or “intervening regions” or “intervening sequences.” Introns are segments of a gene that are transcribed into nuclear RNA (hnRNA); introns may contain regulatory elements such as enhancers. Introns are removed or “spliced out” from the nuclear or primary transcript; introns therefore are absent in the messenger RNA (mRNA) transcript. The mRNA functions during translation to specify the sequence or order of amino acids in a nascent polypeptide.

[0045] Where “amino acid sequence” is recited herein to refer to an amino acid sequence of a naturally occurring protein molecule, “amino acid sequence” and like terms, such as “polypeptide” or “protein” are not meant to limit the amino acid sequence to the complete, native amino acid sequence associated with the recited protein molecule.

[0046] The term “wild-type” refers to a gene or gene product that has the characteristics of that gene or gene product when isolated from a naturally occurring source. A wild-type gene is that which is most frequently observed in a population and is thus arbitrarily designed the “normal” or “wild-type” form of the gene. In contrast, the terms “modified,” “mutant,” “polymorphism,” and “variant” refer to a gene or gene product that displays modifications in sequence and/or functional properties (i.e., altered characteristics) when compared to the wild-type gene or gene product. It is noted that naturally-occurring mutants can be isolated; these are identified by the fact that they have altered characteristics when compared to the wild-type gene or gene product.

[0047] As used herein, the term “competes for binding” is used in reference to a first polypeptide with an activity which binds to the same substrate as does a second polypeptide with an activity, where the second polypeptide is a variant of the first polypeptide or a related or dissimilar polypeptide. The efficiency (e.g., kinetics or thermodynamics) of binding by the first polypeptide may be the same as or greater than or less than the efficiency substrate binding by the second polypeptide. For example, the equilibrium binding constant (K_{D}) for binding to the substrate may be different for the two polypeptides. The term “Km” as used herein refers to the Michaelis-Menton constant for an enzyme and is defined as the concentration of the specific substrate at which a given enzyme yields one-half its maximum velocity in an enzyme catalyzed reaction.

[0048] The term “naturally-occurring” as used herein as applied to an object refers to the fact that an object can be found in nature. For example, a polypeptide or polynucleotide sequence that is present in an organism (including viruses) that can be isolated from a source in nature and which has not been intentionally modified by man in the laboratory is naturally-occurring.

[0049] As used herein, the term “purified” or “to purify” refers to the removal of contaminants from a sample. For example, odorant receptor antibodies are purified by removal of contaminating non-immunoglobulin proteins; they are also purified by the removal of immunoglobulin that does not bind an odorant receptor polypeptide. The removal of non-immunoglobulin proteins and/or the removal of immunoglobulins that do not bind an odorant receptor results in an increase in the percent of odorant receptor-reactive immunoglobulins in the sample. In another example, recombinant odorant receptor polypeptides are expressed in bacterial host cells and the polypeptides are purified by the removal of host cell proteins; the percent of recombinant odorant receptor polypeptides is thereby increased in the sample.

[0050] The term “recombinant DNA molecule” as used herein refers to a DNA molecule that is comprised of segments of DNA joined together by means of molecular biological techniques.

[0051] The term “recombinant protein” or “recombinant polypeptide” as used herein refers to a protein molecule that is expressed from a recombinant DNA molecule.

[0052] The term “native protein” as used herein, is used to indicate a protein that does not contain amino acid residues encoded by vector sequences; that is the native protein contains only those amino acids found in the protein as it occurs in nature. A native protein may be produced by recombinant means or may be isolated from a naturally occurring source.

[0053] As used herein the term “portion” when in reference to a protein (as in “a portion of a given protein”) refers to fragments of that protein. The fragments may range in size from four consecutive amino acid residues to the entire amino acid sequence minus one amino acid.

[0054] The term “antigenic determinant” as used herein refers to that portion of an antigen that makes contact with a particular antibody (i.e., an epitope). When a protein or fragment of a protein is used to immunize a host animal, numerous regions of the protein may induce the production of antibodies that bind specifically to a given region or three-dimensional structure on the protein; these regions or structures are referred to as antigenic determinants. An antigenic determinant may compete with the intact antigen (i.e., the “immunogen” used to elicit the immune response) for binding to an antibody.

[0055] The term “test compound” refers to any chemical entity, pharmaceutical, drug, and the like that can be used to treat or prevent a disease, illness, sickness, or disorder of bodily function, or otherwise alter the physiological or cellular status of a sample (e.g., odorant). Test compounds comprise both known and potential therapeutic compounds. A test compound can be determined to be therapeutic by screening using the screening methods of the present invention.

[0056] A “known therapeutic compound” refers to a therapeutic compound that has been shown (e.g., through animal trials or prior experience with administration to humans) to be effective in such treatment or prevention.

[0057] The term “sample” as used herein is used in its broadest sense. A sample suspected of containing a human chromosome or sequences associated with a human chromosome may comprise a cell, chromosomes isolated from a cell (e.g., a spread of metaphase chromosomes), genomic DNA (in solution or bound to a solid support such as for Southern blot analysis), RNA (in solution or bound to a solid support such as for Northern blot analysis), cDNA (in solution or bound to a solid support) and the like. A sample suspected of containing a protein may comprise a cell, a portion of a tissue, an extract containing one or more proteins and the like.

[0058] As used herein, the term “response,” when used in reference to an assay, refers to the generation of a detectable signal (e.g., accumulation of reporter protein, increase in ion concentration, accumulation of a detectable chemical product).

[0059] As used herein, the term “reporter gene” refers to a gene encoding a protein that may be assayed. Examples of reporter genes include, but are not limited to, luciferase (See, e.g., deWet et al., Mol. Cell. Biol. 7:725 [1987] and U.S. Pat. Nos., 6,074,859; 5,976,796; 5,674,713; and 5,618,682; all of which are incorporated herein by reference), green fluorescent protein (e.g., GenBank Accession Number U43284; a number of GFP variants are commercially available from CLONTECH Laboratories, Palo Alto, Calif.), chloramphenicol acetyltransferase, β-galactosidase, alkaline phosphatase, and horse radish peroxidase.

[0060] The term “system” is used to refer to an on-line odorant receptor-odorant interaction system, an example of which is described in the present specification. The term “database” is used to refer to a data structure for storing information for use by the system, and an example of such a data structure in described in the present specification.

[0061] The term “user” refers to a person using the systems or methods of the present invention.

[0062] As used herein, the terms “processor” and “central processing unit” or “CPU” are used interchangeably and refer to a device that is able to read a program from a computer memory (e.g., ROM or other computer memory) and perform a set of steps according to the program. As used herein, the terms “computer memory” and “computer memory device” refer to any storage media readable by a computer processor. Examples of computer memory include, but are not limited to, RAM, ROM, computer chips, digital video discs (DVD), compact discs (CDs), hard disk drives (HDD), and magnetic tape.

[0063] As used herein, the term “computer readable medium” refers to any device or system for storing and providing information (e.g., data and instructions) to a computer processor. Examples of computer readable media include, but are not limited to, DVDs, CDs, hard disk drives, magnetic tape and servers for streaming media over networks.

[0064] As used herein, the term “hyperlink” refers to a navigational link from one document to another, or from one portion (or component) of a document to another. Typically, a hyperlink is displayed as a highlighted word or phrase that can be selected by clicking on it using a mouse to jump to the associated document or documented portion.

[0065] As used herein, the term “Internet” refers to any collection of networks using standard protocols. For example, the term includes a collection of interconnected (public and/or private) networks that are linked together by a set of standard protocols (such as TCP/IP, HTTP, and FTP) to form a global, distributed network. While this term is intended to refer to what is now commonly known as the Internet, it is also intended to encompass variations that may be made in the future, including changes and additions to existing standard protocols or integration with other media (e.g., television, radio, etc). The term is also intended to encompass non-public networks such as private (e.g., corporate) Intranets.

[0066] As used herein, the terms “World Wide Web” or “web” refer generally to both (i) a distributed collection of interlinked, user-viewable hypertext documents (commonly referred to as Web documents or Web pages) that are accessible via the Internet, and (ii) the client and server software components which provide user access to such documents using standardized Internet protocols. Currently, the primary standard protocol for allowing applications to locate and acquire Web documents is HTTP, and the Web pages are encoded using HTML. However, the terms “Web” and “World Wide Web” are intended to encompass future markup languages and transport protocols that may be used in place of (or in addition to) HTML and HTTP. As used herein, the term “web site” refers to a computer system that serves informational content over a network using the standard protocols of the World Wide Web. Typically, a Web site corresponds to a particular Internet domain name and includes the content associated with a particular organization. As used herein, the term is generally intended to encompass both (i) the hardware/software server components that serve the informational content over the network, and (ii) the “back end” hardware/software components, including any non-standard or specialized components, that interact with the server components to perform services for Web site users. As used herein, the term “HTML” refers to HyperText Markup Language that is a standard coding convention and set of codes for attaching presentation and linking attributes to informational content within documents. During a document authoring stage, the HTML codes (referred to as “tags”) are embedded within the informational content of the document. When the Web document (or HTML document) is subsequently transferred from a Web server to a browser, the codes are interpreted by the browser and used to parse and display the document. Additionally, in specifying how the Web browser is to display the document, HTML tags can be used to create links to other Web documents (commonly referred to as “hyperlinks”). As used herein, the term “HTTP” refers to HyperText Transport Protocol that is the standard World Wide Web client-server protocol used for the exchange of information (such as HTML documents, and client requests for such documents) between a browser and a Web server. HTTP includes a number of different types of messages that can be sent from the client to the server to request different types of server actions. For example, a “GET” message, which has the format GET, causes the server to return the document or file located at the specified URL. As used herein, the term “URL” refers to Uniform Resource Locator that is a unique address that fully specifies the location of a file or other resource on the Internet. The general format of a URL is protocol://machine address:port/path/filename. The port specification is optional, and if none is entered by the user, the browser defaults to the standard port for whatever service is specified as the protocol. For example, if HTTP is specified as the protocol, the browser will use the HTTP default port of 80.

[0067] As used herein, the term “in electronic communication” refers to electrical devices (e.g., computers, processors, etc.) that are configured to communicate with one another through direct or indirect signaling. For example, a conference bridge that is connected to a processor through a cable or wire, such that information can pass between the conference bridge and the processor, are in electronic communication with one another. Likewise, a computer configured to transmit (e.g., through cables, wires, infrared signals, telephone lines, etc) information to another computer or device, is in electronic communication with the other computer or device. As used herein, the term “transmitting” refers to the movement of information (e.g., data) from one location to another (e.g., from one device to another) using any suitable means.

[0068] As used herein, the term “XML” refers to Extensible Markup Language, an application profile that, like HTML, is based on SGML. XML differs from HTML in that: information providers can define new tag and attribute names at will; document structures can be nested to any level of complexity; any XML document can contain an optional description of its grammar for use by applications that need to perform structural validation. XML documents are made up of storage units called entities, which contain either parsed or unparsed data. Parsed data is made up of characters, some of which form character data, and some of which form markup. Markup encodes a description of the document's storage layout and logical structure. XML provides a mechanism to impose constraints on the storage layout and logical structure, to define constraints on the logical structure and to support the use of predefined storage units. A software module called an XML processor is used to read XML documents and provide access to their content and structure.

### DETAILED DESCRIPTION OF THE INVENTION

[0069] The present invention relates to compositions and methods for identifying odorant-odorant receptor interactions. In particular, the present invention relates to in silico methods for identifying odorant receptor-odorant interactions based on chemical and physical properties of odorant receptors and odorants.

[0070] In experiments conducted during the course of development of embodiments of the present invention, starting with over 450 mouse and human ORs, agonists for 52 mouse and 10 human ORs were identified. These data were used to develop a multidimensional metric for receptor similarity, quantify the breadth of receptor tuning in odorant space, identify ORs capable of discriminating three enantiomeric odorant pairs, distinguish activation profiles of class I and class II ORs, distinguish activation profiles of human and mouse ORs, and develop a model to predict odorant-receptor activation.

[0071] Agonists for over five times more mouse ORs than human ORs were identified. The present invention is not limited to a particular mechanism. Indeed, an understanding of the mechanism is not necessary to practice the present invention. Nonetheless, this may indicate, as previously suggested (Menashe et al., BMC Bioinformatics 7, 393 (2006); Young et al., Hum Mol Genet 11, 535-46 (2002); each herein incorporated by reference in their entirety), that mice have even more functional ORs relative to humans than the genome sequences predict. This could reflect a large fraction of nonfunctional genes among the intact human ORs (Mainland, J. Heredity 36, 143-144 (1945); herein incorporated by reference in its entirety) or a large fraction of nonfunctional variants among the human OR clones used for screening. Alternatively, this difference in mouse and human OR response to agonist may be due to bias in odorant choice or technical problems in the heterologous system specific to the human ORs.

[0072] Eighteen physicochemical odorant descriptors that predict the functional data were identified. Odorant similarity calculated using these descriptors is highly correlated with similarity using Haddad et al.'s previously identified 32 descriptors (r=0.77, p<0.0001) across a set of over 2500 odorants. The descriptors described herein outperform Haddad et al.'s descriptors (Haddad et al., Nature Methods 5:425 (2008); herein incorporated by reference in its entirety).

[0073] Properties of 160R amino acid residues that predict the functional data were identifed.

[0074] Of these 16 residues, 12 occur in predicted transmembrane domains, three occur in predicted extracellular domains and one occurs in a predicted intracellular domain. This is consistent with functional evidence and computational predictions that the binding pocket of olfactory receptors is formed by the transmembrane domains (Man et al., Protein Sci 13, 240-54 (2004); Katada et al., J Neurosci 25, 1806-15 (2005); Zhang et al., Genomics 83, 802-11 (2004); Baldwin, Curr Opin Cell Biol 6, 180-90 (1994); each herein incorporated by reference in their entirety). However these residues do not necessarily correspond to the binding site of the ORs, because amino acid residues far from the binding pocket may affect ligand specificity by changing the global conformation of the folded protein.

[0075] Enantiomers have very similar physicochemical properties, but mammals can discriminate between members of some enantiomeric pairs (Laska et al., Neuroscience 144, 295-301 (2007); Rubin et al., Nat Neurosci 4, 355-6 (2001); Joshi et al., Chemical Senses 31, 655-64 (2006); Linster et al., J Neurosci 22, 6842-5 (2002); each herein incorporated by reference in their entirety). The (+) and (−) enantiomers of carvone activate overlapping but distinct sets of olfactory neurons in mice (Ma et al., Proc Natl Acad Sci USA 97, 12869-74 (2000); herein incorporated by reference in its entirety). Consistent with these previous reports, it was found that some ORs can distinguish between enantiomers, although many cannot. ORs capable of supplying sufficient information for the discrimination of three enantiomeric pairs were identified. With two exceptions, class I ORs are expressed only in the anterior-dorsal-most zone of the olfactory epithelium in mice (Tsuboi et al, Eur J Neurosci 23, 1436-44 (2006); herein incorporated by reference in its entirety). In agreement with the theory that the olfactory mucosa serves as a chromatographic separator of odorants, with ORs responding to fast-sorbing hydrophilic compounds expressed early in the airstream and ORs responding to slow-sorbing hydrophobic compounds expressed at locations further along in the airstream (Mozell et al., Thorax 46, 21-4 (1991); Schoenfeld et al., Chemical Senses 31, 131-44 (2006); each herein incorporated by reference in their entirety), it was found that class I ORs prefer polar (and therefore hydrophilic) compounds. This indicates that the location of receptor expression along the mucosa may be related to the ligands that bind the receptor.

[0076] Humans have approximately 387 potentially functional ORs (in other words, ORs with an intact open reading frame); mice have approximately 1035 (Niimura et al., Gene 346, 23-8 (2005); herein incorporated by reference in its entirety). Despite this difference in OR number, behavioral studies have failed to show a clear distinction between rodents and primates in odorant detection threshold (Laska et al., Chemical Senses 25, 47-53 (2000); herein incorporated by reference in its entirety). The present invention is not limited to a particular mechanism. Indeed, an understanding of the mechanism is not necessary to practice the present invention. Nonetheless, this may be due to a lack of data, or it may be due to compensatory mechanisms such as a shortened nose or more computation at later neural stages (Shepherd, PLoS Biol 2, E146 (2004); each herein incorporated by reference in their entirety). In the present data set it was found, unexpectedly, that human ORs are more sensitive than mouse ORs. Thus, in some embodiments, the present invention provides methods of identifying odorants that are more likely to activate either human or mouse ORs. For example, in some embodiments, the present invention provides a model to predict the interaction of ORs and their ligands.

### I. Olfactory Sensation

[0077] The olfactory system represents one of the oldest sensory modalities in the phylogenetic history of mammals. Olfaction is less developed in humans than in other mammals such as rodents. As a chemical sensor, the olfactory system detects food and influences social and sexual behavior. The specialized olfactory epithelial cells characterize the only group of neurons capable of regeneration. Activation occurs when odiferous molecules come in contact with specialized processes known as the olfactory vesicles. Within the nasal cavity, the turbinates or nasal conchae serve to direct the inspired air toward the olfactory epithelium in the upper posterior region. This area (only a few centimeters wide) contains more than 100 million olfactory receptor cells. These specialized epithelial cells give rise to the olfactory vesicles containing kinocilia, which serve as sites of stimulus transduction. There are three specialized neural systems are present within the nasal cavities in humans: 1) the main olfactory system (cranial nerve I), 2) trigeminal somatosensory system (cranial nerve V), 3) the nervus terminalis (cranial nerve 0). CN I mediates odor sensation. It is responsible for determining flavors. CN V mediates somatosensory sensations, including burning, cooling, irritation, and tickling. CN 0 is a ganglionated neural plexus. It spans much of the nasal mucosa before coursing through the cribriform plate to enter the forebrain medial to the olfactory tract. The exact function of the nervus terminalis is unknown in humans. The olfactory neuroepithelium is a pseudostratified columnar epithelium. The specialized olfactory epithelial cells are the only group of neurons capable of regeneration. The olfactory epithelium is situated in the superior aspect of each nostril, including cribriform plate, superior turbinate, superior septum, and sections of the middle turbinate. It harbors sensory receptors of the main olfactory system and some CN V free nerve endings. The olfactory epithelium loses its general homogeneity postnatally, and as early as the first few weeks of life metaplastic islands of respiratory-like epithelium appear. The metaplasia increases in extent throughout life. It is presumed that this process is the result of insults from the environment, such as viruses, bacteria, and toxins.

[0078] There are 6 distinct cells types in the olfactory neuroepithelium: 1) bipolar sensory receptor neurons, 2) microvillar cells, 3) supporting cells, 4) globose basal cells, 5) horizontal basal cells, 6) cells lining the Bowman's glands. There are approximately 6,000,000 bipolar neurons in the adult olfactory neuroepithelium. They are thin dendritic cells with rods containing cilia at one end and long central processes at the other end forming olfactory fila. The olfactory receptors are located on the ciliated dendritic ends. The unmyelinated axons coalesce into 40 bundles, termed olfactory fila, which are ensheathed by Schwann-like cells. The fila transverses the cribriform plate to enter the anterior cranial fossa and constitute CN I. Microvillar cells are near the surface of the neuroepithelium, but the exact functions of these cells are unknown. Supporting cells are also at the surface of the epithelium. They join tightly with neurons and microvillar cells. They also project microvilli into the mucus. Their functions include insulating receptor cells from one another, regulating the composition of the mucus, deactivating odorants, and protecting the epithelium from foreign agents. The basal cells are located near the basement membrane, and are the progenitor cells from which the other cell types arise. The Bowman's glands are a major source of mucus within the region of the olfactory epithelium.

[0079] The odorant receptors are located on the cilia of the receptor cells. Each receptor cell expresses a single odorant receptor gene. There are approximately 1,000 classes of receptors at present. The olfactory receptors are linked to the stimulatory guanine nucleotide binding protein Golf. When stimulated, it can activate adenylate cyclase to produce the second messenger cAMP, and subsequent events lead to depolarization of the cell membrane and signal propagation. Although each receptor cell only expresses one type of receptor, each cell is electrophysiologically responsive to a wide but circumscribed range of stimuli. This implies that a single receptor accepts a range of molecular entities.

[0080] The olfactory bulb is located on top of the cribriform plate at the base of the frontal lobe in the anterior cranial fossa. It receives thousands of primary axons from olfactory receptor neurons. Within the olfactory bulb, these axons synapse with a much smaller number of second order neurons which form the olfactory tract and project to olfactory cortex. The olfactory cortex includes the frontal and temporal lobes, thalamus, and hypothalamus. Although mammalian ORs were identified over 10 years ago, little is known about the selectivity of the different ORs for chemical stimuli, mainly because it has been difficult to express ORs on the cell surface of heterologous cells and assay their ligand-binding specificity (see, e.g., Mombaerts, P. (2004) Nat Rev Neurosci 5, 263-278; herein incorporated by reference in its entirety). The reason is that OR proteins are retained in the ER and subsequently degraded in the proteosome (see, e.g., Lu, M., et al., (2003) Traffic 4, 416-433; McClintock, T. S., (1997) Brain Res Mol Brain Res 48, 270-278; each herein incorporated by reference in their entireties). Despite these difficulties, extensive efforts have matched about 20 ORs with cognate ligands with various degrees of certainty (see, e.g., Bozza, T., et al., (2002) J Neurosci 22, 3033-3043; Gaillard, I., et al., (2002) Eur J Neurosci 15, 409-418; Hatt, H., et al., (1999) Cell Mol Biol 45, 285-291; Kajiya, K., et al., (2001) J Neurosci 21, 6018-6025; Krautwurst, D., et al., (1998) Cell 95, 917-926; Malnic, B., et al., (1999) Cell 96, 713-723; Raming, K., et al., (1993) Nature 361, 353-356; Spehr, M., et al., (2003) Science 299, 2054-2058; Touhara, K., et al., (1999) Proc Natl Acad Sci USA 96, 4040-4045; Zhao, H., et al., (1998) Science 279, 237-242; each herein incorporated by reference in their entirety). Adding the 20 N-terminal amino acids of rhodopsin (e.g., Rho-tag) or a foreign signal peptide to the N-terminus facilitates surface expression of some ORs in heterologous cells (see, e.g., Hatt, H., et al., (1999) Cell Mol Biol 45, 285-291; Krautwurst, D., et al., (1998) Cell 95, 917-926; each herein incorporated in their entirety). However, for most ORs, modifications do not reliably promote cell-surface expression. For example, ODR-4, which is required for proper localization of chemosensory receptors in C. elegans, has a small effect on facilitating cell-surface expression of one rat OR, but not another OR (see, e.g., Gimelbrant, A. A., et al., (2001) J Biol Chem 276, 7285-7290; herein incorporated by reference). These findings indicate that olfactory neurons have a selective molecular machinery that promotes proper targeting of OR proteins to the cell surface, but no components of this machinery have been identified (see, e.g., Gimelbrant, A. A., et al., (2001) J Biol Chem 276, 7285-7290; McClintock, T. S., and Sammeta, N. (2003) Neuroreport 14, 1547-1552; each herein incorporated by reference in their entirety).

[0081] For some GPCRs, accessory proteins are required for correct targeting to the cell surface membrane (see, e.g., Brady, A. E., and Limbird, L. E. (2002) Cell Signal 14, 297-309; herein incorporated by reference in its entirety). These proteins include NinaA for Drosophila Rhodopsin (see, e.g., Baker, E. K., et al., (1994) Embo J 13, 4886-4895; Shieh, B. H., et al., (1989) Nature 338, 67-70; each herein incorporated by reference in their entirety), RanBP2 for mammalian cone opsin (see, e.g., Ferreira, P. A., et al., (1996) Nature 383, 637-640; herein incorporated by reference in its entirety), RAMPs for the mammalian calcitonin receptor—like receptor (CRLR) (see, e.g., McLatchie, L. M., et al., (1998) Nature 393, 333-339; herein incorporated by reference in its entirety) and finally the M10 family of MHC class I proteins and beta 2 microglobulin for V2Rs, the putative mammalian pheromone receptors (see, e.g., Loconto, J., et al., (2003) Cell 112, 607-618; herein incorporated by reference in its entirety). With the exception of NinaA and RanBP2, none of these accessory proteins share any sequence homology to with each other; their only common feature is their association with the membrane. The present invention provides novel proteins (e.g., REEP1, RTP1, RTP2, RTP1-A, RTP1-B, RTP1-C, RTP1-D, RTP1-E, RTP1-A1, RTP1-D1, RTP-D2, RTP-D3, RTP1-A1-A (Chimera 1), RTP1-A1-D2 (Chimera 2), RTP1-A1-D1 (Chimera 3), RTP4-A1-A (Chimera 4), RTP4-A1-D2 (Chimera 5), and RTP4-A1-D1 (Chimera 6)) promoting OR cell surface localization and OR functional expression, and numerous compositions and methods related to these findings.

### II. Odorant Receptor-Odorant Interaction Model

[0082] In some embodiments, the present invention provides systems and methods for identifying odorant receptor-odorant interactions. In some embodiments, the model provides an in silico method to identify candidate odorants that are likely to interact with a given odorant receptor (e.g., a known or novel odorant receptor). In some embodiments, the present invention provides methods of identifying odorants with binding properties similar to a known odorant. In other embodiments, the model provides an in silico method to identify odorant receptors that are likely to interact with a given odorant.

[0083] In some embodiments, the model of embodiments of the present invention utilizes one or more (e.g., 2 or more, 5 or more, 10 or more) of the chemicophysical properties of odorants described in FIG. 3 (e.g., Harary H index, topological polar surface area using N, O polar contributions, leverage-weighted autocorrelation of lag 0/weighted by atomic polarizabilities, R autocorrelation of lag 6/weighted by atomic polarizabilities, topological polar surface area using N, O, S, P polar contributions, Radial Distribution Function—11.0/weighted by atomic masses, valence connectivity index chi-2, phenol/enol/carboxyl OH, R autocorrelation of lag 2/weighted by atomic Sanderson electronegativities, R maximal autocorrelation of lag 4/weighted by atomic masses, graph vertex complexity index, Geary autocorrelation—lag 1/weighted by atomic masses, Ha attached to C3(sp3)/C2(sp2)/C3(sp2)/C3(sp), molecular path count of order 04, leverage-weighted autocorrelation of lag 2/unweighted, hydrophilic factor, 2st component symmetry directional WHIM index/weighted by atomic van der Waals volumes, and R maximal index/weighted by atomic polarizabilities). In some embodiments, all of properties described herein are utilized in the model. In some embodiments, additional odorant properties are used in the optimization of the data.

[0084] In some embodiments, the model utilizes amino acid property descriptors of odorant receptors (e.g., volume, composition, polarity, relative to the position in an amino acid alignment of known odorant receptor sequences) to model receptor-odorant interactions. In some embodiments, the alignment methods described in Example 1 and the positions described in Table 6 are used in modeling. In some embodiments, additional odorant receptor properties are used in the optimization of the data.

[0085] In some embodiments, the present invention provides computer implemented systems and methods for identifying odorant receptor-ordorant interactions. In some embodiments, computer implemented systems and methods generate a report of the results of the modeling methods that provides candidate odorants or odorant receptors. In some embodiments, reports rank a plurality candidate odorants or odorant receptors using a numerical or other scale (e.g., graphical or textual). In some embodiments, the report is provided over the Internet or on a computer monitor.

[0086] In some embodiments, the systems and methods of the present invention are provided as an application service provider (ASP) (e.g., can be accessed by users within a web-based platform via a web browser across the Internet; is bundled into a network-type appliance and run within an institution or an intranet; or is provided as a software package and used as a stand-alone system on a single computer).

### III. Uses

[0087] The systems and methods described herein find use in a variety of research, clinical, and commercial uses. For example, in some embodiments, the systems and methods are utilized in research applications to indentify candidate odorants or odorant receptors. In some embodiment, the identification of odorant receptor-odorant interactions find use in clinical applications (e.g., in diagnosing or treating diseases of odorant function). In some embodiments, odorants identified using the systems and methods of embodiments of the present invention find use in commercial applications (e.g., as additives in food, cosmetic, perfume, household, or industrial products).

### EXPERIMENTAL

[0088] The following examples are provided in order to demonstrate and further illustrate certain preferred embodiments and aspects of the present invention and are not to be construed as limiting the scope thereof.

### Example 1

### A. Materials and Methods

[0089] Cloning mouse and human ORs. 219 mouse and 245 human odorant receptors were cloned with sequence information from The Olfactory Receptor Database (Healy et al., Chemical Senses 22, 321-6 (1997); herein incorporated by reference in its entirety). The nomenclature proposed by the D. Lancet group for the human ORs (Glusman et al., Genome Res 11, 685-702 (2001); herein incorporated by reference in its entirety) and by the S. Firestein group for the mouse ORs (Zhang et al., Nat Neurosci 5, 124-33 (2002); herein incorporated by reference in its entirety) was used. OR open reading frames were amplified from genomic DNA using proofreading KOD DNA polymerase (Toyobo/Novagen) and subcloned into pCI expression vectors (Promega) containing the first 20 residues of human rhodopsin (Rho tag). The sequences of the cloned receptors were verified by sequencing (3100 Genetic Analyzer, ABI Biosystems).
Immunocytochemistry and FACS analysis. For live cell-surface staining, the mouse monoclonal anti-rhodopsin antibody, 4D2 (Laird et al., Invest Opthalmol Vis Sci 29, 419-28 (1988); herein incorporated by reference in its entirety) and Cy3-conjugated donkey anti-mouse IgG (Jackson Immunologicals) were used. For FACS analysis, phycoerythrin (PE)-conjugated anti-mouse IgG (Jackson Immunologicals) was used. In order to monitor the transfection efficiency, Green Fluorescent Protein (GFP) was co-transfected with the OR. The intensity of receptor cell surface expression was calculated as the ratio of PE and GFP expression. 7-aminoactinomycin D (Calbiochem) was added before flow cytometry to mark dead cells which were excluded from the analysis. The gate and mean of PE positive cells was normalized by GFP values.
Luciferase assay. Dual-Glo™ Luciferase Assay System (Promega) was used for the luciferase assay as previously described (Saito et al., Cell 119, 679-91 (2004)). Odorant receptor activation leads to an increase in intracellular cAMP; CRE-luciferase (Stratagene) was used to measure this change. Renilla luciferase driven by a constitutively active SV40 promoter (pRL-SV40; Promega) served as an internal control for cell viability and transfection efficiency. Hana3A cells were plated on poly-D-lysine-coated 96-well plates (BioCoat; Becton Dickinson). ORs were transfected with Rho tag in a Hana3A cell line along with RTP1S (Zhuang et al., J Biol Chem 282, 15284-93 (2007); herein incorporated by reference in its entirety), CRE-luciferase, and pRL-SV40 using Lipofectamine2000 (Invitrogen). For each 96-well plate transfected, 1 μg of CRE-Luc, 1 μg of pRL-SV40, 5 μg of odorant receptor plasmid, and 1 μg of RTP1S was used. Approximately 24 hours post transfection, the medium was replaced with CD293 chemically defined medium (Gibco) and the plate was incubed for 30 min at 37° C. The medium was then replaced with 25 μL of odorant solution diluted in CD293 and the plate was incubated for 4 hrs at 37° C. and 5% CO2. The manufacturer's protocols for measuring luciferase and Renilla luciferase activities was followed. Luminescence was measured using a Wallac Victor 1420 plate reader (Perkin-Elmer). All luminescence values were divided by the Renilla Luciferase activity to control for transfection efficiency in a given well. Normalized luciferase activity was calculated using the formula (LN−Lmin)/(Lmax−Lmin), where LN is the luminescence of firefly luciferase in response to the odorant, Lmin is the minimum luciferase value on a plate or set of plates, and Lmax is the maximum luciferase value on a plate or set of plates. The data was analyzed using Microsoft Excel and GraphPad Prism 4.
Screening procedure. The entire OR library was stimulated with eight separate odorant mixtures formed from 93 odorants (FIG. 12). The mixtures were applied at 100 μM and all ORs that did not show activity (the ratio of CRE-Luciferase to Renilla luciferase was less than 0.1 above baseline) were eliminated. The mixtures were applied at five different doses (1 μM, 10 μM, 100 μM, 300 μM and 1 mM) and all ORs that did not show dose-dependent activity to any of the eight mixtures (statistical significance was not assessed for this screening stage) were eliminated, leaving 121 human receptors (49.4%) and 169 mouse receptors (77.2%). A comparison between the 93 individual odorants at a 100 μM dose and a no-odor control was performed for all 290 odorants. Each comparison was performed in triplicate; statistical significance was assessed by t-test (uncorrected for multiple comparisons). In addition, the consistency of the experimental conditions was confirmed with two positive controls: MOR203-1 with nonanoic acid, and MOR32-1 with nonanoic acid. 27 human ORs (11.0%) and 102 mouse ORs (46.6%) showed a significant response to at least one of 67 odorants relative to a no-odor control. Dose-response curves ranging from 10 nM to 3 mM were constructed for each combination of 129 receptors and 67 odorants. A single odorant was used on each plate to avoid cross-contamination, and each OR odorant dose was tested at least three times. The data was fit to a sigmoidal curve. An odorant/receptor pair was counted as a significant activation if both the normalized activity at 100 μM was significantly different than the baseline activity (using a t-test), and the standard deviation of the fitted log EC50 was less than 0.5 log units. It was confirmed that the raw CRE-Luc curve and the normalized (Luc/RL) curve EC50 values did not differ by more than 1 log step. As a result, 52 mouse (23.7%) and 10 human (0.04%) ORs that showed a significant dose-dependent response to one or more of 63 odorants were identified (FIG. 1). Four odorants failed to activate any OR in this final stage.
Physicochemical descriptors. Molecular structure files were obtained for each odorant from PubChem and these structures were inputted into the Virtual Computational Chemistry Laboratory (Tetko et al., J. Comput. Aid. Mol. Des. 19, 453-63 (2005); herein incorporated by reference in its entirety). Then, CORINA (Gasteiger et al., Tetrahedron Comput. Method 3, 537-547 (1992); herein incorporated by reference in its entirety) was used to obtain 3D coordinates and Dragon (Talete) to compute 1664 physicochemical descriptors.
Receptor descriptors. 14250R amino acid sequences from Niimura and Nei (Niimura et al., Gene 346, 23-8 (2005); herein incorporated by reference in its entirety) and 464 OR amino acid sequences from an OR library were aligned using the MUSCLE algorithm (Edgar, BMC Bioinformatics 5, 113 (2004); herein incorporated by reference in its entirety) in Seaview (Galtier et al., Comput Appl Biosci 12, 543-8 (1996); herein incorporated by reference in its entirety) with manual adjustment for conserved domains (Table 2). All sites that were gaps in over 90% of the 1425 ORs were eliminated, leaving 327 amino acids. The set of 981 descriptors consisted of the polarity, composition and volume of these 327 residues, as defined by Grantham (Grantham, Science 185, 862-4 (1974); herein incorporated by reference in its entirety). Differences between disease alleles and wild-type alleles computed using these properties are on average greater than those observed between putatively neutral polymorphic alleles, indicating that these properties are functionally relevant (Miller et al., Hum Mol Genet 10, 2319-28 (2001); herein incorporated by reference in its entirety).
Correlations between descriptors and responses. Each descriptor was z-scored across 2683 odorants (Table 5) or all 1425 receptors (Table 2). All odorants for which there were fewer than 3 responsive receptors were eliminated. For all remaining odorant pairs the Pearson correlation between EC50 vectors and the Euclidean distance between descriptor vectors was calculated. The Pearson correlation between these two sets of distances was then measured.
Optimizing descriptors. A greedy optimization algorithm, as in (Haddad et al., Nature Methods 5, 425-429 (2008); herein incorporated by reference in its entirety), was used to determine the best set. In this method one begins with an empty set of descriptors. Each descriptor is combined with the previous set of descriptors and correlation values are computed for all of these candidate sets of descriptors. To reduce overfitting, the data is randomly divided into ten subsets and correlation values are computed for each leave-one out subset. The final correlation coefficient for each set of descriptors is the average of the correlation coefficients for each subset. The set with the best correlation coefficient then becomes the new set of descriptors and the process is repeated until the correlation coefficient increases by less than 0.004 in three consecutive iterations.

[0090] This method was validated on each dataset using a leave-10-out cross-validation scheme. In other words, the descriptors were optimized using 90% of the data, and then tested on the remaining 10% of the data. This division was repeated ten times such that all subdivisions were test sets and the average performance over all test sets was reported. It was then verified that this optimization does not work as well for randomly shuffled vectors. The same descriptor values as in the actual vectors was used, but shuffled each descriptor independently so that any given object had a random set of descriptor values. 30 sets of these objects with shuffled descriptor values were created. For each of these 30 sets descriptors were optimized for 90% of the data and the descriptors were tested on the remaining 10% of the data. The average of all 30 values was reported. The performance of the real optimized descriptors was compared to the shuffled optimized descriptors using a two-sample t-test with unequal variance.

Breadth of tuning. A receptor's breadth of tuning is defined as the radius of a hypersphere, centered on the center of mass of all of the receptor's agonists and enclosing all of the receptor's agonists in Haddad et al's (supra) odorant space. For reference, a hypersphere enclosing 2,683 odorants (Table 6) has a radius of 26; a hypersphere enclosing the 93 odorants in the test set has a radius of 14; a hypersphere enclosing the 63 odorants that activated at least one receptor has a radius of 12.
Machine-learning algorithm. The support vector machines (SVM) functions in the Bioinformatics Toolbox of Matlab (Mathworks) were used to classify the odorants in the data set. To estimate the discrimination ability of the classifier for class I/class II discriminations and human/mouse discriminations, the data set was jackknifed. In other words, the classifier was trained on all but one instance and then tested on that instance. This was repeated n times, where n was the total number of instances. Signal detection theory was used to compute the sensitivity index (d′), which is the separation of the means of the two distributions (class I and class II agonists, or mouse and human agonists) in units of standard deviation. It was confirmed that the d′ was significantly different from zero according to Marascuilo's test (Marascuilo, Psychometrika 35, 237-243 (1970); herein incorporated by reference in its entirety). The Rank features function in the MATLAB Bioinformatics Toolbox to determine the physicochemical properties that best predict membership in a class. A cross-correlation weighting value of 0.7 was applied to reduce the number of highly correlated properties.
Predicting odorant-OR interactions. Each of the 3,906 tested odorant-OR interactions were represented by a vector of 1664 physicochemical descriptors and 981 receptor descriptors. A cross-validation procedure was used to determine if a subset of these vectors could predict if the odorant-OR combination resulted in activation (i.e. all colored squares in FIG. 1). A ten-fold validation procedure was used in two different ways. In the first method, all 62 rows of odorant-OR interactions were divided into 10 sets (leave-receptor-out). In the second method, all 63 columns of odorant interactions were divided into ten sets (leave-odorant-out). After choosing the test set for a round the greedy optimization method described above was used to calculate optimized descriptor sets for the other nine sets (training data). After this selection of attributes logistic regression in JMP v6 (SAS Institute) was performed on the training set and the resulting coefficients used to predict the probability of activation for the test set. This method was repeated ten times for each of the three selection processes, rotating the test set each iteration, such that the entire data set was evaluated using a model that was not trained on its respective test set. Receiver operating characteristic curves were generated according to (Fawcett, Pattern Recognition Letters 27, 861-874 (2006); herein incorporated by reference in its entirety). Statistical significance was determined using a Mann-Whitney U-test comparing the distribution of predicted odds for interactions resulting in activation to the distribution of predicted odds for interactions resulting in no activation.

### B. Results

### High-Throughput Screening of Mouse and Human ORs

[0091] Libraries of mouse and human ORs that represent a large fraction of the total mouse and human OR families were generated (Table 2). The mouse OR library comprises 219 mouse ORs that represent over 21% of the total 1035 mouse OR genes and includes at least one member of 217 out of the 228 mouse OR subfamilies defined by Zhang and Firestein (Nat Neurosci 5, 124-33 (2002); herein incorporated by reference in its entirety). The human OR library comprises 245 ORs that represent 63% of the 387 human OR genes. Although many human OR genes are polymorphic (I. Menashe, et al., PLoS Biol 5, e284 (2007); A. Keller, et al., Nature 449, 468-72 (2007); I. Menashe, et al., Nat Genet 34, 143-4 (2003); each herein incorporated by reference in their entirety), a single variant of each receptor was used in the screen (Table 2).

[0092] The entire OR library was stimulated with one of 8 odorant mixtures drawn from 93 odorants chosen to represent diverse functional groups, sizes, and structures (Table 3). Each mixture was applied at five different concentrations. 121 human ORs (49.4%) and 169 mouse ORs (77.2%) showed a response to at least one mixture at one concentration. The 93 odorants were then applied individually at 100 μM to the 290 mixture-responsive ORs. 27 human ORs (11.0%) and 102 mouse ORs (46.6%) showed a significant response [p<0.05, uncorrected for multiple comparisons] to at least one of 67 odorants relative to a no-odor control. Dose-response curves were then prepared for every combination of 129 receptors and 67 odorants that showed a response significantly above baseline in the previous step. In this more stringent test, 52 mouse and 10 human ORs were identified that responded to one or more of 63 odorants (FIG. 1, also see FIG. 9-11 and Table 4), representing 23.7% of the original mouse library and 4% of the original human library. The additional four odorants and 67 receptors did not elicit or show a significant response in this follow-up. Although the positive responses resulted in discovery of a large number of OR agonists, the failure of a specific OR to respond to any of the tested odorants may reflect a failure of the OR to function in the assay rather than a lack of sensitivity to the tested odorant. In further analyses on results for receptors that responded to at least one of the tested odorants, and were therefore unequivocally functional in the assay, were analyzed.

### Bias in Odorant and Receptor Representation

[0093] One problem in the field of olfaction research is the lack of an agreed-upon metric to organize odorants; for example there is currently no agreed-upon metric to quantify odorant similarity (Haddad et al., Current Opinion in Neurobiology 18, 1-7 (2008); herein incorporated by reference in its entirety). Without such a metric it is difficult to choose a random sample of odorants that fairly represents all odorants, as all odorants have discrete molecular structures that differ in such physicochemical properties as molecular weight, carbon number, functional groups, and hydrophobicity. A bias in odorant sampling may give a misleading estimate of a receptor's preferred physicochemical features as well as lead to faulty extrapolation of odorant similarity. Due to the large number of physicochemical properties thought to determine odorant similarity, a broad descriptor set was used to show the bias in the chosen odorant set and principal component analysis (PCA) was used to simplify the organization of these odorants. PCA is a method for transforming a number of possibly correlated variables into a smaller number of uncorrelated variables.

[0094] To examine the bias in the odorant set, a 1664-dimensional space was constructed in which each dimension represents a physicochemical property. 2683 commercially available odorants (Table 5) were plotted in the resulting odorant space. A two dimensional projection of this 1664-dimensional odorant space is shown in FIG. 2A.

[0095] To examine the bias in the resulting OR cohort, the distance between 1425 human and mouse ORs was mapped (Niimura et al., Gene 346, 23-8 (2005); herein incorporated by reference in its entirety) (Table 2). A 1425×1425 distance matrix was constructed using the Jukes-Cantor method and visualized in two dimensional space using principal component analysis (FIGS. 2B, 13).

[0096] The first principal component (PC1) of odorant space correlates with molecular size (Khan et al., J. Neurosci 27:10015 (2007); herein incorporated by reference in its entirety). FIG. 2A indicates that, although there is dense coverage of the middle of PC1, there is less dense coverage at very large and very small odorants. The criterion of including at least one member of 217 out of the 228 mouse receptor subfamilies insured a broad coverage in receptor space based on full-sequence similarity.

### Physicochemical Odorant Properties Predict Functional Data

[0097] Early studies focused on small sets of odorant features, such as carbon chain length and functional group, to explain response variability in the olfactory system. More recent studies have used more quantitative approaches using broader sets of physicochemical descriptors. In one such study, physicochemical descriptors of odorants predicted approximately 35% of the variation in perceived odorant pleasantness (Khan, et al., J Neurosci 27, 10015-23 (2007); herein incorporated by reference in its entirety). This finding indicates that physicochemical descriptors might be useful for predicting earlier stages of olfactory perception. Indeed, two recent studies showed that physicochemical descriptors explain 43 to 72% of the variance in receptor neuron responses (Schmuker et al., Chem Cent J 1, 11 (2007); herein incorporated by reference in its entirety) and, in a meta-analysis, that a set of 32 physicochemical descriptors explained an average of 48% of the variance in neural responses for various olfactory data sets (Haddad et al., Nature Methods 5:425 (2008); herein incorporated by reference in its entirety). The experiments described herein examined how well several proposed metrics predict the functional data (FIG. 3A).

[0098] In the data set, carbon number alone described a very small portion of the variance in receptor response (r=0.07, p<0.04). Functional group descriptors (r=0.42, p<0.0001) explained nearly as much variance as all 1664 tested descriptors (r=0.43, p<0.0001). Haddad et al. (supra) proposed a set of 32 descriptors, a subset of the 1664 used here, that described a large portion of the variance in a meta-analysis of 8 olfactory data sets. These descriptors outperformed carbon number, the set of functional group descriptors, and the full set of descriptors (r=0.59, p<0.0001). Haddad et al. optimized the set of 32 descriptors using a meta-analysis including data from different model organisms, different measurement techniques, and different levels of the olfactory system. The present experiments similarly optimized the descriptor set using a greedy optimization algorithm using a leave-10-out cross-validation scheme, but only on data from the present assay system. On average, this technique explained 60% of the variance in the left-out dataset (r=0.77). To verify that this result was not due to chance, each descriptor vector was randomly shoveled to create a new set of randomized descriptors from the same distribution. Real descriptors significantly outperformed shuffled descriptors [shuffled r=0.55, t(23)=9.09, p<0.0001]. Having validated this technique, the algorithm was applied to the entire dataset. To reduce overfitting, descriptors were chosed that explained the most variance averaged over ten divisions of the dataset, resulting in a set of 18 descriptors that explain over 62% of the variance in the dataset (r=0.79, p<0.0001) (FIG. 3B-C). In other words, much of the variation in OR responses can be explained by a fairly small set of physicochemical descriptors.

### Receptor Sequence Predicts Functional Data

[0099] OR genes are classified into families and subfamilies based on sequence alignment of the full-length proteins. Because of the paucity of functional data regarding these receptors, it is unclear if these divisions correspond to functional variability (Abaffy et al., J Neurochem 97, 1506-18 (2006); herein incorporated by reference in its entirety). In other words, the assumption that full-length protein sequence variability predicts functional variability has not been tested on a comprehensive set of receptors.

Here this is tested by examining how well the properties of amino acids residues predict the functional data (FIG. 4A).

[0100] As with odorants, a set of descriptors for ORs was constructed. Using a multiple alignment of 1425 intact mouse and human ORs (Table 2), amino acid properties (polarity, composition, and volume) were calculated as defined by Grantham (Grantham, Science 185, 862-4 (1974); herein incorporated by reference in its entirety) for 327 amino acid residues common to at least 10% of the ORs. The entire set of descriptors explained only 7% of the variance (r=0.28, p<0.0001). Recently, Man et al. (PLoS ONE 2, e682 (2007); herein incorporated by reference in its entirety) proposed that comparison of predicted ligand-binding residues predicted functional variation more accurately than full-length comparisons. Restricting the set of descriptors to the 66 properties of 22 predicted binding site residues (Man et al., Protein Sci 13:240 (2004); herein incorporated by reference in its entirety), however, did not improve prediction of functional variation (r=0.17, p<0.0001). The descriptor set was optimized using a greedy optimization algorithm using a leave-10-out cross validation scheme. On average, this technique explained 40% of the variance in the left-out dataset (r=0.63). To verify that this result was not due to chance, each descriptor vector was randomly shuffled to create a new set of randomized descriptors from the same distribution. As expected, real descriptors significantly outperformed shuffled descriptors [r=0.18, t(12)=8.53, p<0.0001]. Having validated this technique, the algorithm was applied to the entire dataset. To reduce overfitting, descriptors that explained the most variance averaged over ten divisions of the dataset were chosen, resulting in a set of 16 descriptors that explain over 53% of the variance in the dataset (r=0.73, p<0.0001) (FIGS. 4B and C, also see Table 5).

### Breadth of Tuning

[0101] In color vision, three broadly-tuned receptors sense the entire visible range of wavelengths (De Valois et al., Vision Res 33, 1053-65 (1993); herein incorporated by reference in its entirety). In addition, approximately 3,500 narrowly-tuned cochlear hair cells sense the audible spectrum of frequencies. In olfaction, it is not clear if receptors are broadly or narrowly tuned. Given the aforementioned lack of an agreed-upon metric for measuring odorant similarity this question has traditionally been answered in terms of a receptor's number of agonists. These values (number of agonists) are listed for five receptors in FIG. 5A. On the second line of FIG. 5A the sensitivity of the receptor to each odorant is incorporated to create a tuning curve (for sensitivity ordered tuning curves for all receptors see FIG. 14). Note that the x-axis is ordered to place the most sensitive odorant in the center and is different for each receptor. A metric used to define an odorant receptor as “broadly” or “narrowly” tuned should preferable, however, take into account not only the number of agonists to which it responds, but also the similarity of those agonists to each other. On the third line of FIG. 5A the x-axis is ordered to reflect odorant similarity, in other words the x-axis represents the odorant's position along the first principal component of Haddad et al's 32-dimensional odorant space (Haddad et al., Nature Methods 5, 425-429 (2008); herein incorporated by reference in its entirety) (for one-dimensional tuning curves based on the first principal component for all receptors see FIG. 15). This first principal component only describes 19.4% of the variance in odorant space. Using more principal components, as in the fourth line of FIG. 5A, describes more of the variance in odorant space, but beyond three principal components is difficult to display in a figure (for two-dimensional tuning curves based on the first two principal components for all receptors see FIG. 16). The radius of a circle enclosing all of the agonists, as in the fourth line of FIG. 5A, gives a measure of tuning breadth that, unlike the figure, can be scaled to high dimensional space. The radius of a hypersphere enclosing all five receptors' agonists in Haddad et al's 32-dimensional odorant space is listed on the fifth line of FIG. 5A, and for all receptors in FIG. 5B. The results reveal that the mammalian ORs vary along a continuum of tuning breadths. In other words, some receptors are broadly tuned, responding to a large number of odorants that occupy a large area of odorant space (i.e. are structurally dissimilar), others are more narrowly tuned, and some respond to only a small number of closely related odorants.

### Receptor-Response to Enantiomers

[0102] Enantiomers—stereoisomers that are nonsuperimposable mirror images of each other—impose a constraint on olfactory theories because, even though they have many identical properties, mammals can discriminate between the members of some pairs (Laska et al., Neuroscience 144, 295-301 (2007); Rubin et al., Nat Neurosci 4, 355-6 (2001); Joshi et al., Chemical Senses 31, 655-64 (2006); Linster et al., J Neurosci 22, 6842-5 (2002); each herein incorporated by reference in their entirety). Four pairs of enantiomers were examined: phenylbutyric acid, carvone, fenchone, and camphor. The (+) and (−) enantiomers of carvone activate overlapping but distinct sets of olfactory neurons in mice (Ma et al., PNAS, 97:12869 (2000); herein incorporated by reference in its entirety). Consistent with these previous reports, it was found that the response of an OR to one enantiomer is highly correlated with its response to the other enantiomer (r=0.85, p<0.0001). A receptor basis for the ability to perceptually distinguish between three of the four enantiomers was found: for example MOR107-1 is activated only by the (−) enantiomer of fenchone and MOR271-1 is only activated by the (+) enantiomer of fenchone. At some doses, MOR2-1 responded more strongly to the (+) enantiomer of 2-phenylbutyric acid, no receptors responded to only one enantiomer of 2-phenylbutyric acid (FIG. 6). Enantiomers were the most similar odorant pairs in terms of physicochemical descriptors (FIGS. 3B,D).

### Functional Comparison of Class I and Class II Odorant Receptors

[0103] Class I and class II ORs did not differ in number of agonists (p=0.11, Mann-Witney U-test) (FIG. 7A), breadth of odor tuning in odorant space (p=0.21, Mann-Witney Utest) (FIG. 7B), or sensitivity to odorant concentration (p=0.99, Mann-Whitney U-test) (FIG. 7C). However, it was possible to differentiate class I OR agonists from class II OR agonists using a machine-learning algorithm trained on the physicochemical descriptors of the agonists (d′=1.98, p<0.0001).

[0104] It was then asked what molecular features best differentiated class I from class II agonists. The top 10 descriptors are shown in Table IA. Agonists for class I ORs are significantly more hydrophilic than agonists for class II ORs (median class I hydrophilic factor=−0.2440, mean class II hydrophilic factor=−0.8020, p<0.001, Mann-Whitney U-test after Bonferroni correction for 1664 descriptors), and have a higher topological polar surface area (median class I TPSA=37.3, mean class II TPSA=17.1, p<0.001, Mann-Whitney U-test after Bonferroni correction for 1664 descriptors).

### Functional Comparison of Human and Mouse Receptors

[0105] Humans have fewer than 400 ORs with an intact open reading frame whereas mice have more than 1000 (Zhang et al., Nat Neurosci 5, 124-33 (2002); Glusman et al., Genome Res 11, 685-702 (2001); Niimura et al., Proc Natl Acad Sci USA 100, 12235-40 (2003); Malnic et al., Proc Natl Acad Sci USA 101, 2584-9 (2004); Godfrey et al., Proc Natl Acad Sci USA 101, 2156-61 (2004); each herein incorporated by reference in their entirety). The present invention is not limited to a particular mechanism. Indeed, an understanding of the mechanism is not necessary to practice the present invention. Nonetheless, one hypothesis to account for this difference in OR number is that humans may have preferentially retained broadly-tuned receptors to retain the ability to detect most odorants at the expense of sensitivity to low concentration odorants (Lapidot et al., Genomics 71, 296-306 (2001); herein incorporated by reference in its entirety). There was not a significant difference between mouse and human receptors in the number of agonists (p=0.25, Mann-Whitney U-test) (FIG. 7D) or breadth of tuning in odorant space (p=0.14, Mann-Whitney U-test) (FIG. 7E). On average, human ORs were significantly more sensitive than mouse receptors (p<0.008, Mann-Whitney U-test) (FIG. 7F). This finding contradicts the hypothesis that mouse ORs are more sensitive to low-concentration odorants than human ORs.

[0106] Using a machine-learning algorithm trained on the physicochemical descriptors of the odorants as above, it was possible to differentiate odorants that activated human Ors from odorants that activated mouse ORs (d′=0.62, p<0.013). The 10 molecular features that best differentiate odorants activating human receptors from odorants activating mouse receptors are shown in Table 1B.

### Predicting Odorant-Receptor Interactions

[0107] Except for a few examples (Jacquier et al., J Neurochem 97, 537-44 (2006); Schmiedeberg et al., J Struct Biol 159, 400-12 (2007); Abaffy et al., J Neurochem 97, 1506-18 (2006); Sanz et al., Chemical Senses 33, 639-53 (2008); Araneda et al., Nat Neurosci 3, 1248-55 (2000); Katada et al., J Neurosci 25, 1806-15 (2005); each herein incorporated by reference in their entirety), knowledge of what makes an OR ligand interaction effective is very limited. The present experiments have greatly increased the number of ORs with known agonists. Moreover, all 62 receptors were tested with the same 63 odorants in a consistent assay, allowing for the determination of general rules that govern the interaction between odorant and OR.

[0108] Logistic regression was used to differentiate odorant-OR combinations that result in a response from odorant-OR combinations that fail to elicit a response. Both physicochemical descriptors and amino acid properties were combined to predict the interaction of novel odorants with novel ORs.

[0109] A leave-10-out cross validation procedure was used to validate the model, in each round selecting a set of descriptors that best predicted the training data and applying those descriptors to the test data. The values to leave out were selected using two different methods. First, 10% of the receptors were reserved, simulating a situation in which an investigator is searching for the response of novel ORs to odorants that activate a known OR. The model predicted the response of the ‘novel’ ORs to the 63 odorants [area under the receiver operating characteristic curve (AUC)=0.59, p<0.0001, Mann-Whitney U-test] (FIG. 8A). Second, 10% of the odorants were reserved, simulating a situation in which an investigator is searching for the response of Ors with known agonists to untested odorants. The model predicted the response of all 62 ORs to the ‘novel’ odorants (AUC=0.64, p<0.0001, Mann-Whitney U-test) (FIG. 8B).

TABLE 1
The top 10 physicochemical descriptors for distinguishing between agonists for (A)
class I and class II receptors or (B) human and mouse receptors.

| | Class I | | Class II | |
|---|---|---|---|---|
| A. Top ten descriptors that differentiate | average | | average | |
| class I from class II agonists | value | SE | value | SE |
| Geary autocorrelation - lag 2/weighted by | 0.643 | 0.0021 | 0.733 | 0.0007 |
| atomic masses | | | | |
| Eigenvalue sum from van der Waals weighted | −1.908 | 0.0103 | −0.954 | 0.002 |
| distance matrix | | | | |
| Eigenvalue sum from polarizability weighted | −2.4 | 0.0129 | −1.2 | 0.0026 |
| distance matrix | | | | |
| Radial Distribution Function - 4.5/weighted | 0.748 | 0.0213 | 1.759 | 0.0058 |
| by atomic polarizabilities | | | | |
| 3D-MoRSE - signal 25/unweighted | 0.376 | 0.0036 | 0.534 | 0.0007 |
| 3D-MoRSE - signal 23/weighted by atomic | −0.873 | 0.0067 | −0.445 | 0.0015 |
| Sanderson electronegativities | | | | |
| 2st component symmetry directional WHIM | 0.193 | 0.0008 | 0.23 | 0.0003 |
| index/unweighted | | | | |
| 3rd component accessibility directional WHIM | 0 | 0.0017 | 0.007 | 0.0004 |
| index/weighted by atomic electrotopological | | | | |
| states | | | | |
| H autocorrelation of lag 2/unweighted | 0.989 | 0.0064 | 1.405 | 0.0017 |
| R maximal autocorrelation of lag 2/weighted | 0.024 | 0.0001 | 0.035 | 0 |
| by atomic polarizabilities | | | | |
| | Human | | Mouse | |
| B. Top ten descriptors that differentiate | average | | average | |
| human from mouse agonists | value | SE | value | SE |
| molecular electrotopological variation | 7.347 | 0.0423 | 10.151 | 0.0105 |
| self-returning walk count of order 10 | 2528 | 40.9437 | 5378 | 21.7641 |
| Eigenvalue 01 from edge adjacency atrix | 3.562 | 0.0082 | 3.6245 | 0.0019 |
| weighted by dipole moments | | | | |
| Spectral moment 09 from edge adjacency | 11.4595 | 0.0306 | 11.6935 | 0.0068 |
| matrix weighted by dipole moments | | | | |
| 1st component symmetry directional WHIM | 0.186 | 0.0017 | 0.197 | 0.0007 |
| index/unweighted | | | | |
| 1st component symmetry directional WHIM | 0.177 | 0.0017 | 0.191 | 0.0004 |
| index/weighted by atomic van der Waals | | | | |
| volumes | | | | |
| 1st component symmetry directional WHIM | 0.177 | 0.0017 | 0.191 | 0.0004 |
| index/weighted by atomic Sanderson | | | | |
| electronegativities | | | | |
| leverage-weighted autocorrelation of lag 2/ | 0.055 | 0.001 | 0.076 | 0.0003 |
| weighted by atomic masses | | | | |
| first eigenvalue of the R matrix | 0.8295 | 0.0008 | 0.86 | 0.0003 |
| R autocorrelation of lag 2/weighted by atomic | 0.3085 | 0.0022 | 0.415 | 0.0007 |
| masses | | | | |

TABLE 3

| Odorant Set 1 | Odotant Set 2 | Odorant Set 3 | Odorant set 4 |
|---|---|---|---|
| Pentanoic acid | 4-Hydroxycoumarin | 2-Butanone | tert-Butyl propionate |
| Propionic acid | 4-Chromanone | 2-Pentanone | Methyl butyrate |
| Hexanoic acid | 2-Coumaranone | 2-Hexanone | Propyl butyrate |
| Heptanoic acid | γ-Caprotactone | 2-Heptanone | Pentyl acetate |
| Octanoic Acid | Coumarin | 3-Heptanone | Allyl heptanoate |
| Nonanoic acid | Cyclohexanone | 2-Octanone | Amyl hexanoate |
| Decanoic acid | | 3-Octanone | Amyl butyrate |
| Isovaleric acid | | 2-Nonanone | Butyl heptanoate |
| Thioglycolic acid | | 2,3-Hexanedione | Heptyl isobutyrate |
| Nonanedioic acid | | 3,4-Hexanedione | Hexyl acetate |
| Vanillic acid | | (+)-Carvone | Butyl butyryllactate |
| (+)-2-Phenylbutyric | | (−)-Carvone | Butyl formate |
| acid | | (+)-Dihydrocarvone | Ethyl pyruvate |
| (−)-2-Phenylbutyric | | (−)-Fenchone | Isoamyl acetate |
| acid | | (+)-Fenchone | Ethyl isobutyrate |
| | | (+)-Camphor | Prenyl acetate |
| | | (−)-Camphor | |
| | | Dihydrojasmone | |
| | | Acetophenone | |
| | | Benzophenone | |
| | | (+)-Pulegone | |
| | | 2-Furyl methyl ketone | |
| | | Dimedone | |
| | | (−)-Menthone | |
| | | Ionone | |
| Odorant set 5 | Odorant set 6 | Odorant set 7 | Odorant set 8 |
| 1-Butanol | Allyl phenylacetate | Octanethiol | Butanal |
| 1-Propanol | Benzene | Nonanethiol | Pentanal |
| 1-Pentanol | Benzyl acetate | | Hexanal |
| 1-Hexanol | Allylbenzene | | Heptanal |
| 1-Heptanol | Phenyl acetate | | Octanal |
| 1-Octanol | Prenyl acetate | | Nonanal |
| 1-Nonanol | | | Decanal |
| 1-Decanol | | | Acetal |
| (+)-2-Heptanol | | | Citral |
| (−)-2-Octanol | | | Hydroxycitronellal |
| (+)-2-Octanol | | | Lyral |
| (−)-β-Citronellol | | | |
| Geraniol | | | |
| Linalool | | | |
| 1-Undecanol | | | |

TABLE 4

| | (+)-2-Phenylbutyric acid | (+)-Camphol | (+)-Carvone | (+)-Dihydrocarvone | (+)-Fenchone | (−)-2-Phenylbutric acid | (−)-Camphor |
|---|---|---|---|---|---|---|---|
| MOR1-1 | 0 | 0 | 0 | 0 | 0 | 0 | 0 |
| MOR105-1 | 0 | 0 | 0 | 0 | 0 | 0 | 0 |
| MOR106-1 | 0 | 0 | 0 | 0 | 0 | 0 | 0 |
| MOR107-1 | 0 | −4.15 | 0 | 0 | 0 | 0 | −3.704 |
| MOR128-2 | 0 | −3.772 | 0 | 0 | 0 | 0 | −4.373 |
| MOR129-1 | 0 | 0 | −4.145 | 0 | 0 | 0 | 0 |
| MOR138-1 | 0 | −4.749 | 0 | −3.498 | −4.626 | 0 | −4.952 |
| MOR139-1 | 0 | −3.681 | −4.032 | −3.637 | −3.773 | 0 | −3.902 |
| MOR140-1 | 0 | 0 | 0 | 0 | 0 | 0 | 0 |
| MOR15-1 | 0 | 0 | 0 | 0 | 0 | 0 | 0 |
| MOR161-1 | 0 | 0 | 0 | 0 | 0 | 0 | 0 |
| MOR162-1 | 0 | 0 | 0 | 0 | 0 | 0 | 0 |
| MOR170-1 | 0 | 0 | 0 | 0 | 0 | 0 | 0 |
| MOR18-1 | 0 | 0 | 0 | 0 | 0 | 0 | 0 |
| MOR180-1 | 0 | 0 | 0 | 0 | 0 | 0 | 0 |
| MOR182-1 | 0 | 0 | 0 | −3.406 | 0 | 0 | 0 |
| MOR184-1 | 0 | 0 | −3.812 | −3.55 | 0 | 0 | 0 |
| MOR185-1 | 0 | −3.18 | 0 | 0 | 0 | 0 | 0 |
| MOR189-1 | 0 | −3.631 | −4.302 | −3.976 | −4.423 | 0 | −4.839 |
| MOR2-1 | −3.499 | 0 | 0 | 0 | 0 | −2.982 | 0 |
| MOR203-1 | 0 | 0 | −3.814 | −4.241 | 0 | 0 | 0 |
| MOR204-6 | 0 | 0 | −3.85 | 0 | 0 | 0 | 0 |
| MOR205-1 | 0 | 0 | 0 | 0 | 0 | 0 | 0 |
| MOR207-1 | 0 | 0 | 0 | 0 | 0 | 0 | 0 |
| MOR222-1 | 0 | 0 | 0 | 0 | 0 | 0 | 0 |
| MOR223-1 | 0 | 0 | 0 | 0 | 0 | 0 | 0 |
| MOR23-1 | 0 | 0 | 0 | 0 | 0 | 0 | 0 |
| MOR236-1 | 0 | 0 | 0 | 0 | 0 | 0 | 0 |
| MOR25-1 | 0 | 0 | 0 | 0 | 0 | 0 | 0 |
| MOR250-1 | 0 | 0 | −3.938 | 0 | 0 | 0 | 0 |
| MOR251-1 | 0 | −3.31 | 0 | 0 | 0 | 0 | 0 |
| MOR253-1 | 0 | 0 | 0 | 0 | 0 | 0 | 0 |
| MOR256-17 | 0 | 0 | 0 | 0 | 0 | 0 | 0 |
| MOR258-1 | 0 | 0 | 0 | 0 | 0 | 0 | 0 |
| MOR259-1 | 0 | 0 | 0 | 0 | 0 | 0 | 0 |
| MOR260-1 | 0 | 0 | 0 | 0 | 0 | 0 | 0 |
| MOR261-1 | 0 | 0 | 0 | 0 | 0 | 0 | 0 |
| MOR268-1 | 0 | 0 | 0 | 0 | 0 | 0 | 0 |
| MOR269-1 | 0 | 0 | 0 | 0 | 0 | 0 | 0 |
| MOR271-1 | 0 | 0 | −4.098 | −3.987 | −4.859 | 0 | 0 |
| MOR272-1 | 0 | 0 | −4.564 | −4.273 | −4.35 | 0 | 0 |
| MOR273-1 | 0 | 0 | 0 | 0 | −4.073 | 0 | 0 |
| MOR277-1 | 0 | −3.519 | 0 | 0 | 0 | 0 | −3.861 |
| MOR30-1 | 0 | 0 | 0 | 0 | 0 | 0 | 0 |
| MOR31-1 | 0 | 0 | 0 | 0 | 0 | 0 | 0 |
| MOR33-1 | 0 | 0 | 0 | 0 | 0 | 0 | 0 |
| MOR37-1 | 0 | 0 | 0 | 0 | 0 | 0 | 0 |
| MOR4-1 | 0 | 0 | 0 | 0 | 0 | 0 | 0 |
| MOR40-1 | 0 | 0 | 0 | 0 | 0 | 0 | 0 |
| MOR41-1 | 0 | 0 | −4.644 | −4.301 | 0 | 0 | 0 |
| MOR5-1 | 0 | 0 | 0 | 0 | 0 | 0 | 0 |
| MOR9-1 | 0 | 0 | 0 | 0 | 0 | 0 | 0 |
| OR10J5 | 0 | 0 | 0 | 0 | 0 | 0 | 0 |
| OR1A1 | 0 | 0 | −5.035 | −4.992 | 0 | 0 | 0 |
| OR2C1 | 0 | 0 | 0 | 0 | 0 | 0 | 0 |
| OR2J2 | 0 | 0 | 0 | 0 | 0 | 0 | 0 |
| OR2M7 | 0 | 0 | 0 | 0 | 0 | 0 | 0 |
| OR2W1 | 0 | 0 | −4.646 | −4.755 | 0 | 0 | 0 |
| OR51E1 | 0 | 0 | 0 | 0 | 0 | 0 | 0 |
| OR51E2 | 0 | 0 | 0 | 0 | 0 | 0 | 0 |
| OR51L1 | 0 | 0 | 0 | 0 | 0 | 0 | 0 |
| OR5P3 | 0 | 0 | −5.173 | 0 | 0 | 0 | 0 |

| | (−)-Carvone | (−)-Fenchone | (−)-b-C [symbol] inedol | 1-Decanol | 1-Heptanol | 1-Hexanol | 1-Nononol | 1-Octanol | 1-Pentanol |
|---|---|---|---|---|---|---|---|---|---|
| MOR1-1 | 0 | 0 | 0 | 0 | 0 | 0 | 0 | 0 | 0 |
| MOR105-1 | 0 | 0 | 0 | 0 | 0 | 0 | 0 | 0 | 0 |
| MOR106-1 | 0 | 0 | 0 | 0 | 0 | 0 | 0 | 0 | 0 |
| MOR107-1 | 0 | −4.302 | 0 | 0 | 0 | 0 | 0 | 0 | 0 |
| MOR128-2 | 0 | 0 | 0 | 0 | 0 | 0 | 0 | 0 | 0 |
| MOR129-1 | 0 | 0 | 0 | 0 | 0 | 0 | 0 | 0 | 0 |
| MOR138-1 | 0 | −4.481 | −3.347 | 0 | 0 | 0 | 0 | 0 | 0 |
| MOR139-1 | −3.861 | −3.879 | 0 | 0 | 0 | 0 | 0 | 0 | 0 |
| MOR140-1 | 0 | 0 | 0 | 0 | 0 | 0 | 0 | 0 | 0 |
| MOR15-1 | 0 | 0 | 0 | 0 | 0 | 0 | 0 | 0 | 0 |
| MOR161-1 | 0 | 0 | 0 | 0 | 0 | 0 | 0 | 0 | 0 |
| MOR162-1 | 0 | 0 | 0 | 0 | 0 | 0 | 0 | 0 | 0 |
| MOR170-1 | 0 | 0 | 0 | 0 | 0 | 0 | 0 | 0 | 0 |
| MOR18-1 | 0 | 0 | 0 | 0 | 0 | 0 | 0 | 0 | 0 |
| MOR180-1 | 0 | 0 | 0 | 0 | 0 | 0 | 0 | 0 | 0 |
| MOR182-1 | 0 | 0 | 0 | 0 | 0 | 0 | 0 | 0 | 0 |
| MOR184-1 | −3.92 | 0 | 0 | 0 | 0 | 0 | 0 | 0 | 0 |
| MOR185-1 | 0 | 0 | 0 | 0 | 0 | 0 | 0 | 0 | 0 |
| MOR189-1 | −4.147 | −4.239 | 0 | 0 | 0 | 0 | 0 | 0 | 0 |
| MOR2-1 | 0 | 0 | 0 | 0 | 0 | 0 | 0 | 0 | 0 |
| MOR203-1 | −3.938 | 0 | −3.147 | −3.299 | −3.387 | 0 | −4.456 | −3.563 | 0 |
| MOR204-6 | −3.625 | 0 | 0 | 0 | 0 | 0 | 0 | 0 | 0 |
| MOR205-1 | 0 | 0 | 0 | 0 | 0 | 0 | 0 | 0 | 0 |
| MOR207-1 | 0 | 0 | 0 | 0 | 0 | 0 | 0 | 0 | 0 |
| MOR222-1 | 0 | 0 | 0 | 0 | 0 | 0 | 0 | 0 | 0 |
| MOR223-1 | 0 | 0 | 0 | 0 | 0 | 0 | 0 | 0 | 0 |
| MOR23-1 | 0 | 0 | 0 | 0 | 0 | 0 | 0 | 0 | 0 |
| MOR236-1 | 0 | 0 | 0 | 0 | 0 | 0 | 0 | 0 | 0 |
| MOR25-1 | 0 | 0 | 0 | 0 | 0 | 0 | 0 | 0 | 0 |
| MOR250-1 | 0 | 0 | 0 | 0 | 0 | 0 | 0 | 0 | 0 |
| MOR251-1 | 0 | 0 | 0 | 0 | 0 | 0 | 0 | 0 | 0 |
| MOR253-1 | 0 | 0 | 0 | 0 | 0 | 0 | 0 | 0 | 0 |
| MOR256-17 | 0 | 0 | 0 | 0 | 0 | 0 | 0 | 0 | 0 |
| MOR258-1 | 0 | 0 | 0 | 0 | 0 | 0 | 0 | 0 | 0 |
| MOR259-1 | 0 | 0 | 0 | 0 | 0 | 0 | 0 | 0 | 0 |
| MOR260-1 | 0 | 0 | 0 | 0 | 0 | 0 | 0 | 0 | 0 |
| MOR261-1 | 0 | 0 | 0 | −3.273 | −3.382 | 0 | −4.914 | −5.192 | 0 |
| MOR268-1 | 0 | 0 | 0 | 0 | 0 | 0 | 0 | −3.63 | 0 |
| MOR269-1 | 0 | 0 | 0 | 0 | 0 | 0 | 0 | 0 | 0 |
| MOR271-1 | −4.14 | 0 | 0 | 0 | −3.47 | 0 | 0 | 0 | 0 |
| MOR272-1 | 0 | −3.558 | 0 | 0 | −4.181 | 0 | 0 | 0 | 0 |
| MOR273-1 | 0 | −5.231 | 0 | 0 | 0 | 0 | 0 | 0 | 0 |
| MOR277-1 | 0 | 0 | 0 | 0 | 0 | 0 | 0 | 0 | 0 |
| MOR30-1 | 0 | 0 | 0 | 0 | 0 | 0 | 0 | 0 | 0 |
| MOR31-1 | 0 | 0 | 0 | 0 | 0 | 0 | 0 | 0 | 0 |
| MOR33-1 | 0 | 0 | 0 | 0 | 0 | 0 | 0 | 0 | 0 |
| MOR37-1 | 0 | 0 | 0 | 0 | 0 | 0 | 0 | 0 | 0 |
| MOR4-1 | 0 | 0 | 0 | 0 | 0 | 0 | 0 | 0 | 0 |
| MOR40-1 | 0 | 0 | 0 | 0 | 0 | 0 | 0 | 0 | 0 |
| MOR41-1 | −4.257 | 0 | 0 | 0 | −3.68 | −4.064 | 0 | 0 | −3.537 |
| MOR5-1 | 0 | 0 | 0 | 0 | 0 | 0 | 0 | 0 | 0 |
| MOR9-1 | 0 | 0 | 0 | 0 | 0 | 0 | 0 | 0 | 0 |
| OR10J5 | 0 | 0 | 0 | 0 | 0 | 0 | 0 | 0 | 0 |
| OR1A1 | −5.765 | 0 | −4.039 | −3.082 | −3.013 | 0 | 0 | 0 | 0 |
| OR2C1 | 0 | 0 | 0 | 0 | 0 | 0 | 0 | 0 | 0 |
| OR2J2 | 0 | 0 | 0 | −3.416 | −3.271 | 0 | −4.16 | −4.16 | 0 |
| OR2M7 | 0 | 0 | −3.853 | 0 | 0 | 0 | 0 | 0 | 0 |
| OR2W1 | −4.657 | 0 | −5.108 | −4.365 | −4.831 | −4.852 | −4.63 | −5.128 | 0 |
| OR51E1 | 0 | 0 | 0 | 0 | 0 | 0 | 0 | 0 | 0 |
| OR51E2 | 0 | 0 | 0 | 0 | 0 | 0 | 0 | 0 | 0 |
| OR51L1 | 0 | 0 | 0 | 0 | 0 | 0 | 0 | 0 | 0 |
| OR5P3 | −4.645 | 0 | 0 | 0 | −2.962 | −3.758 | 0 | 0 | 0 |

| | 2-Counpronon [symbol] | 2-Haptonone | 2-Hexanone | 2-Noranone | 2-Octanone | 2-Penonone | 23-Haxanedione | 3-Haptonone |
|---|---|---|---|---|---|---|---|---|
| MOR1-1 | −4.138 | 0 | 0 | 0 | 0 | 0 | 0 | 0 |
| MOR105-1 | 0 | 0 | 0 | 0 | 0 | 0 | 0 | 0 |
| MOR106-1 | 0 | 0 | 0 | 0 | 0 | 0 | 0 | 0 |
| MOR107-1 | 0 | 0 | 0 | 0 | 0 | 0 | 0 | 0 |
| MOR126-2 | 0 | 0 | 0 | 0 | 0 | 0 | 0 | 0 |
| MOR129-1 | 0 | 0 | 0 | 0 | 0 | 0 | 0 | 0 |
| MOR136-1 | 0 | 0 | 0 | 0 | 0 | 0 | 0 | 0 |
| MOR139-1 | −3.585 | 0 | 0 | 0 | 0 | 0 | 0 | 0 |
| MOR140-1 | 0 | 0 | 0 | 0 | 0 | 0 | 0 | 0 |
| MOR15-1 | 0 | 0 | 0 | 0 | 0 | 0 | 0 | 0 |
| MOR161-1 | 0 | 0 | 0 | 0 | 0 | 0 | 0 | 0 |
| MOR162-1 | 0 | 0 | 0 | 0 | 0 | 0 | 0 | 0 |
| MOR170-1 | 0 | 0 | 0 | 0 | 0 | 0 | 0 | 0 |
| MOR18-1 | 0 | 0 | 0 | 0 | 0 | 0 | 0 | 0 |
| MOR180-1 | 0 | 0 | 0 | 0 | 0 | 0 | 0 | 0 |
| MOR182-1 | 0 | 0 | 0 | 0 | 0 | 0 | 0 | 0 |
| MOR184-1 | 0 | 0 | 0 | 0 | 0 | 0 | 0 | 0 |
| MOR185-1 | 0 | 0 | 0 | 0 | 0 | 0 | 0 | 0 |
| MOR189-1 | 0 | 0 | 0 | 0 | 0 | 0 | 0 | 0 |
| MOR2-1 | 0 | 0 | 0 | 0 | 0 | 0 | 0 | 0 |
| MOR203-1 | 0 | −4.76 | 0 | −5.064 | −5.023 | 0 | 0 | −4.099 |
| MOR204-6 | 0 | 0 | 0 | 0 | 0 | 0 | 0 | 0 |
| MOR205-1 | 0 | 0 | 0 | 0 | 0 | 0 | 0 | 0 |
| MOR207-1 | 0 | 0 | 0 | 0 | 0 | 0 | 0 | 0 |
| MOR222-1 | 0 | 0 | 0 | 0 | 0 | 0 | 0 | 0 |
| MOR223-1 | 0 | 0 | 0 | 0 | 0 | 0 | 0 | 0 |
| MOR23-1 | 0 | 0 | 0 | 0 | 0 | 0 | 0 | 0 |
| MOR236-1 | 0 | 0 | 0 | 0 | 0 | 0 | 0 | 0 |
| MOR25-1 | 0 | 0 | 0 | 0 | 0 | 0 | 0 | 0 |
| MOR250-1 | 0 | 0 | 0 | 0 | 0 | 0 | 0 | 0 |
| MOR251-1 | 0 | 0 | 0 | 0 | 0 | 0 | 0 | 0 |
| MOR253-1 | 0 | 0 | 0 | 0 | 0 | 0 | 0 | 0 |
| MOR256-17 | −4.575 | 0 | 0 | 0 | 0 | 0 | −4.838 | 0 |
| MOR258-1 | −4.268 | 0 | 0 | 0 | 0 | 0 | 0 | 0 |
| MOR259-1 | −3.63 | 0 | 0 | 0 | 0 | 0 | 0 | 0 |
| MOR260-1 | 0 | 0 | 0 | 0 | 0 | 0 | 0 | 0 |
| MOR261-1 | 0 | 0 | 0 | 0 | 0 | 0 | 0 | 0 |
| MOR268-1 | 0 | 0 | 0 | 0 | 0 | 0 | 0 | 0 |
| MOR269-1 | 0 | 0 | 0 | 0 | 0 | 0 | 0 | 0 |
| MOR271-1 | 0 | −4.581 | −4.936 | 0 | 0 | −5.111 | −4.824 | −5.235 |
| MOR272-1 | 0 | −5.073 | −4.251 | 0 | −4.575 | 0 | 0 | −5.221 |
| MOR273-1 | 0 | 0 | 0 | 0 | 0 | 0 | 0 | 0 |
| MOR277-1 | 0 | 0 | 0 | 0 | 0 | 0 | 0 | 0 |
| MOR30-1 | 0 | 0 | 0 | 0 | 0 | 0 | 0 | 0 |
| MOR31-1 | 0 | 0 | 0 | 0 | 0 | 0 | 0 | 0 |
| MOR33-1 | 0 | 0 | 0 | 0 | 0 | 0 | 0 | 0 |
| MOR37-1 | 0 | 0 | 0 | 0 | 0 | 0 | 0 | 0 |
| MOR4-1 | 0 | 0 | 0 | 0 | 0 | 0 | 0 | 0 |
| MOR40-1 | 0 | 0 | 0 | 0 | 0 | 0 | 0 | 0 |
| MOR41-1 | −3.96 | 0 | 0 | 0 | 0 | 0 | −5.008 | 0 |
| MOR5-1 | 0 | 0 | 0 | 0 | 0 | 0 | 0 | 0 |
| MOR9-1 | 0 | 0 | 0 | 0 | 0 | 0 | 0 | 0 |
| OR10J5 | 0 | 0 | 0 | 0 | 0 | 0 | 0 | 0 |
| OR1A1 | 0 | −4.399 | 0 | −3.577 | −4.37 | 0 | 0 | −4.712 |
| OR2C1 | 0 | 0 | 0 | 0 | 0 | 0 | 0 | 0 |
| OR2J2 | 0 | 0 | 0 | 0 | 0 | 0 | 0 | 0 |
| OR2M7 | 0 | 0 | 0 | 0 | 0 | 0 | 0 | 0 |
| OR2W1 | 0 | −5.142 | −4.135 | −4.701 | −4.399 | 0 | −3.363 | −4.477 |
| OR51E1 | 0 | 0 | 0 | 0 | 0 | 0 | 0 | 0 |
| OR51E2 | 0 | 0 | 0 | 0 | 0 | 0 | 0 | 0 |
| OR51L1 | 0 | 0 | 0 | 0 | 0 | 0 | 0 | 0 |
| OR5P3 | 0 | 0 | 0 | 0 | 0 | 0 | 0 | 0 |

| | 3-Octanone | 34-Hexanedione | 4-Chromanone | 4-Hydroxycoumarin | Acetophenone | Allyl benzene | Allyl heptanoate |
|---|---|---|---|---|---|---|---|
| MOR1-1 | 0 | 0 | 0 | 0 | 0 | 0 | 0 |
| MOR105-1 | 0 | 0 | 0 | 0 | −3.429 | −3.332 | 0 |
| MOR106-1 | 0 | 0 | 0 | 0 | −3.854 | −3.921 | 0 |
| MOR107-1 | 0 | 0 | 0 | 0 | 0 | 0 | 0 |
| MOR128-2 | 0 | 0 | 0 | 0 | 0 | 0 | 0 |
| MOR129-1 | 0 | 0 | −3.785 | 0 | −5.484 | 0 | 0 |
| MOR138-1 | 0 | 0 | 0 | 0 | 0 | 0 | 0 |
| MOR139-1 | 0 | 0 | −4.028 | 0 | −3.935 | 0 | 0 |
| MOR140-1 | 0 | 0 | 0 | 0 | 0 | 0 | 0 |
| MOR15-1 | 0 | 0 | 0 | 0 | 0 | 0 | 0 |
| MOR161-1 | 0 | 0 | 0 | 0 | −3.825 | 0 | 0 |
| MOR162-1 | 0 | 0 | −4.225 | 0 | −4.778 | 0 | 0 |
| MOR170-1 | 0 | 0 | −4.209 | 0 | −3.9 | 0 | 0 |
| MOR18-1 | 0 | 0 | 0 | 0 | 0 | 0 | 0 |
| MOR180-1 | 0 | 0 | 0 | 0 | 0 | 0 | 0 |
| MOR182-1 | 0 | 0 | 0 | 0 | 0 | 0 | 0 |
| MOR184-1 | 0 | 0 | 0 | 0 | 0 | 0 | 0 |
| MOR185-1 | 0 | 0 | −3.833 | 0 | −4.016 | 0 | 0 |
| MOR189-1 | 0 | 0 | −3.684 | 0 | −3.372 | 0 | 0 |
| MOR2-1 | 0 | 0 | 0 | 0 | 0 | 0 | 0 |
| MOR203-1 | −4.4 | 0 | 0 | 0 | 0 | 0 | 0 |
| MOR204-6 | 0 | 0 | 0 | 0 | 0 | 0 | 0 |
| MOR205-1 | 0 | 0 | 0 | 0 | 0 | 0 | 0 |
| MOR207-1 | 0 | 0 | −3.724 | 0 | −3.608 | 0 | 0 |
| MOR222-1 | 0 | 0 | −3.618 | 0 | 0 | 0 | 0 |
| MOR223-1 | 0 | 0 | 0 | 0 | 0 | 0 | 0 |
| MOR23-1 | 0 | 0 | 0 | 0 | 0 | 0 | 0 |
| MOR236-1 | 0 | 0 | 0 | 0 | 0 | 0 | 0 |
| MOR25-1 | 0 | 0 | 0 | 0 | 0 | 0 | 0 |
| MOR250-1 | 0 | 0 | 0 | 0 | −3.975 | 0 | 0 |
| MOR251-1 | 0 | 0 | 0 | 0 | 0 | 0 | 0 |
| MOR253-1 | o | 0 | 0 | 0 | 0 | 0 | 0 |
| MOR256-17 | 0 | −4.921 | 0 | 0 | 0 | −4.146 | 0 |
| MOR258-1 | 0 | 0 | 0 | 0 | −3.358 | 0 | 0 |
| MOR259-1 | 0 | 0 | 0 | 0 | 0 | 0 | 0 |
| MOR260-1 | 0 | 0 | 0 | 0 | 0 | 0 | 0 |
| MOR261-1 | 0 | 0 | 0 | 0 | 0 | 0 | 0 |
| MOR268-1 | 0 | 0 | 0 | 0 | 0 | 0 | 0 |
| MOR269-1 | 0 | 0 | 0 | 0 | 0 | 0 | 0 |
| MOR271-1 | −4.139 | −4.734 | −4.047 | 0 | −4.05 | 0 | 0 |
| MOR272-1 | −4.197 | 0 | −4.043 | 0 | −3.922 | 0 | 0 |
| MOR273-1 | 0 | 0 | −4.201 | 0 | 0 | 0 | 0 |
| MOR277-1 | 0 | 0 | −3.415 | 0 | 0 | 0 | 0 |
| MOR30-1 | 0 | 0 | 0 | 0 | 0 | 0 | 0 |
| MOR31-1 | 0 | 0 | 0 | 0 | 0 | 0 | 0 |
| MOR33-1 | 0 | 0 | 0 | 0 | 0 | 0 | 0 |
| MOR37-1 | 0 | 0 | 0 | 0 | 0 | 0 | 0 |
| MOR4-1 | 0 | 0 | 0 | 0 | 0 | 0 | 0 |
| MOR40-1 | 0 | 0 | 0 | 0 | 0 | 0 | 0 |
| MOR41-1 | 0 | −4.692 | −4.747 | −4.344 | −5.039 | 0 | 0 |
| MOR5-1 | 0 | 0 | 0 | 0 | 0 | 0 | 0 |
| MOR9-1 | 0 | 0 | 0 | 0 | 0 | 0 | 0 |
| OR10J5 | 0 | 0 | 0 | 0 | 0 | 0 | 0 |
| OR1A1 | −5.291 | 0 | −3.335 | 0 | 0 | 0 | −3.323 |
| OR2C1 | 0 | 0 | 0 | 0 | 0 | 0 | 0 |
| OR2J2 | 0 | 0 | 0 | 0 | 0 | 0 | 0 |
| OR2M7 | 0 | 0 | 0 | 0 | 0 | 0 | 0 |
| OR2W1 | −5.02 | −4.78 | −4.041 | 0 | −4.372 | 0 | 0 |
| OR51E1 | 0 | 0 | 0 | 0 | 0 | 0 | 0 |
| OR51E2 | 0 | 0 | 0 | 0 | 0 | 0 | 0 |
| OR51L1 | 0 | 0 | 0 | 0 | 0 | 0 | 0 |
| OR5P3 | 0 | 0 | 0 | 0 | −3.898 | 0 | 0 |

| | Allyl phenylacetate | Amyl hexanote | Benzene | Benzophenone | Benzyl acetate | Butyl butyryl actate | Butyl formate | Coumarin |
|---|---|---|---|---|---|---|---|---|
| MOR1-1 | −3.581 | 0 | 0 | 0 | 0 | 0 | 0 | 0 |
| MOR105-1 | 0 | 0 | 0 | 0 | 0 | 0 | 0 | 0 |
| MOR106-1 | 0 | 0 | 0 | 0 | 0 | 0. | 0 | −3.919 |
| MOR107-1 | 0 | 0 | 0 | 0 | 0 | 0 | 0 | 0 |
| MOR128-2 | 0 | 0 | 0 | 0 | 0 | 0 | 0 | 0 |
| MOR129-1 | 0 | 0 | 0 | 0 | 0 | 0 | 0 | −4.04 |
| MOR138-1 | 0 | 0 | 0 | 0 | 0 | 0 | 0 | 0 |
| MOR139-1 | −3.625 | 0 | 0 | 0 | −3.729 | 0 | 0 | −3.749 |
| MOR140-1 | 0 | 0 | 0 | 0 | 0 | 0 | 0 | 0 |
| MOR15-1 | 0 | 0 | 0 | 0 | 0 | 0 | 0 | 0 |
| MOR161-1 | 0 | 0 | 0 | 0 | 0 | 0 | 0 | −3.139 |
| MOR162-1 | 0 | 0 | 0 | −3.685 | 0 | 0 | 0 | −4.483 |
| MOR170-1 | 0 | 0 | 0 | 0 | 0 | 0 | 0 | −3.989 |
| MOR18-1 | 0 | 0 | 0 | 0 | 0 | 0 | 0 | 0 |
| MOR180-1 | 0 | 0 | 0 | 0 | 0 | 0 | 0 | 0 |
| MOR182-1 | 0 | 0 | 0 | 0 | 0 | 0 | 0 | 0 |
| MOR184-1 | 0 | 0 | 0 | 0 | 0 | 0 | 0 | 0 |
| MOR185-1 | 0 | 0 | 0 | 0 | 0 | 0 | 0 | −4.042 |
| MOR189-1 | 0 | 0 | 0 | 0 | 0 | 0 | 0 | −3.215 |
| MOR2-1 | −3.253 | 0 | 0 | 0 | 0 | 0 | 0 | 0 |
| MOR203-1 | −3.401 | 0 | 0 | 0 | −3.531 | 0 | 0 | 0 |
| MOR204-6 | 0 | 0 | 0 | 0 | 0 | 0 | 0 | −5.099 |
| MOR205-1 | 0 | 0 | 0 | 0 | 0 | 0 | 0 | 0 |
| MOR207-1 | 0 | 0 | 0 | 0 | 0 | 0 | 0 | −3.905 |
| MOR222-1 | −3.369 | 0 | 0 | 0 | 0 | 0 | 0 | 0 |
| MOR223-1 | −4.178 | 0 | 0 | 0 | −3.841 | 0 | 0 | 0 |
| MOR23-1 | 0 | 0 | 0 | 0 | 0 | 0 | 0 | 0 |
| MOR236-1 | −4.052 | 0 | 0 | 0 | 0 | 0 | 0 | 0 |
| MOR25-1 | 0 | 0 | 0 | 0 | 0 | 0 | 0 | 0 |
| MOR250-1 | 0 | 0 | 0 | 0 | 0 | 0 | 0 | −3.855 |
| MOR251-1 | 0 | 0 | 0 | 0 | 0 | 0 | 0 | 0 |
| MOR253-1 | 0 | 0 | 0 | 0 | 0 | 0 | 0 | 0 |
| MOR258-17 | −3.842 | −4.462 | 0 | 0 | 0 | 0 | 0 | 0 |
| MOR258-1 | 0 | 0 | 0 | 0 | 0 | 0 | 0 | −4.296 |
| MOR259-1 | 0 | 0 | 0 | −4.442 | 0 | 0 | 0 | −3.834 |
| MOR260-1 | 0 | 0 | 0 | 0 | 0 | 0 | 0 | 0 |
| MOR261-1 | −3.425 | 0 | 0 | 0 | −3.352 | 0 | 0 | 0 |
| MOR268-1 | −3.434 | 0 | 0 | 0 | 0 | 0 | 0 | 0 |
| MOR269-1 | 0 | 0 | 0 | −3.652 | 0 | 0 | 0 | 0 |
| MOR271-1 | −4.23 | 0 | −4.005 | 0 | −5.379 | 0 | 0 | 0 |
| MOR272-1 | −4.824 | 0 | 0 | 0 | −4.948 | 0 | 0 | 0 |
| MOR273-1 | 0 | 0 | 0 | 0 | 0 | 0 | 0 | 0 |
| MOR277-1 | 0 | 0 | 0 | 0 | 0 | 0 | 0 | 0 |
| MOR30-1 | 0 | 0 | 0 | 0 | 0 | 0 | 0 | 0 |
| MOR31-1 | 0 | 0 | 0 | 0 | 0 | 0 | 0 | 0 |
| MOR33-1 | 0 | 0 | 0 | 0 | 0 | 0 | 0 | 0 |
| MOR37-1 | 0 | 0 | 0 | 0 | 0 | 0 | 0 | 0 |
| MOR4-1 | 0 | 0 | 0 | 0 | 0 | 0 | 0 | 0 |
| MOR40-1 | 0 | 0 | 0 | 0 | 0 | 0 | 0 | 0 |
| MOR41-1 | 0 | 0 | 0 | 0 | −3.972 | 0 | 0 | −4.785 |
| MOR5-1 | 0 | 0 | 0 | 0 | 0 | 0 | 0 | 0 |
| MOR9-1 | 0 | 0 | 0 | 0 | 0 | 0 | 0 | 0 |
| OR10J5 | 0 | 0 | 0 | 0 | 0 | 0 | 0 | 0 |
| OR1A1 | −5.119 | 0 | 0 | −4.008 | −3.391 | 0 | 0 | 0 |
| OR2C1 | 0 | 0 | 0 | 0 | 0 | 0 | 0 | 0 |
| OR2J2 | 0 | 0 | 0 | 0 | 0 | 0 | 0 | −3.562 |
| OR2M7 | 0 | 0 | 0 | 0 | 0 | 0 | 0 | 0 |
| OR2W1 | −4.812 | 0 | 0 | −4.54 | −4.786 | 0 | −4.427 | 4.065 |
| OR51E1 | 0 | 0 | 0 | 0 | 0 | −3.473 | 0 | 0 |
| OR51E2 | 0 | 0 | 0 | 0 | 0 | 0 | 0 | 0 |
| OR51L1 | −4.17 | 0 | 0 | 0 | 0 | 0 | 0 | 0 |
| OR5P3 | 0 | 0 | 0 | 0 | 0 | 0 | 0 | −5.25 |

| | Cyclohexanone | Daconal | Decanoic acid | Dihydroiasmone | Ethyl isobutyrate | Getaniol | Heptonal | Heptanoic acid | Hexanol |
|---|---|---|---|---|---|---|---|---|---|
| MOR1-1 | 0 | 0 | 0 | 0 | 0 | 0 | 0 | −3.823 | −3.987 |
| MOR105-1 | 0 | 0 | 0 | 0 | 0 | 0 | 0 | 0 | 0 |
| MOR106-1 | 0 | 0 | 0 | 0 | 0 | 0 | 0 | 0 | 0 |
| MOR107-1 | 0 | 0 | 0 | 0 | 0 | 0 | 0 | 0 | 0 |
| MOR128-2 | 0 | 0 | 0 | 0 | 0 | 0 | 0 | 0 | 0 |
| MOR129-1 | 0 | 0 | 0 | 0 | 0 | 0 | 0 | 0 | 0 |
| MOR136-1 | −3.065 | 0 | 0 | 0 | 0 | 0 | 0 | 0 | 0 |
| MOR139-1 | −3.138 | 0 | 0 | −4.308 | 0 | −3.939 | 0 | 0 | 0 |
| MOR140-1 | 0 | 0 | 0 | −3.614 | 0 | 0 | 0 | 0 | 0 |
| MOR15-1 | 0 | 0 | 0 | 0 | 0 | 0 | 0 | 0 | 0 |
| MOR161-1 | 0 | 0 | 0 | 0 | 0 | 0 | 0 | 0 | 0 |
| MOR162-1 | 0 | 0 | 0 | 0 | 0 | 0 | 0 | 0 | 0 |
| MOR170-1 | 0 | 0 | 0 | 0 | 0 | 0 | 0 | 0 | 0 |
| MOR18-1 | 0 | 0 | 0 | 0 | 0 | 0 | 0 | 0 | 0 |
| MOR180-1 | 0 | 0 | 0 | 0 | 0 | 0 | 0 | 0 | 0 |
| MOR182-1 | 0 | 0 | 0 | 0 | 0 | 0 | 0 | 0 | 0 |
| MOR184-1 | 0 | 0 | 0 | 0 | 0 | 0 | 0 | 0 | 0 |
| MOR185-1 | −3.594 | 0 | 0 | 0 | 0 | 0 | 0 | 0 | 0 |
| MOR189-1 | 0 | 0 | 0 | −3.945 | 0 | 0 | 0 | 0 | 0 |
| MOR2-1 | 0 | 0 | 0 | 0 | 0 | 0 | 0 | 0 | 0 |
| MOR203-1 | 0 | 0 | −3.751 | 0 | 0 | −3.622 | 0 | 0 | 0 |
| MOR204-6 | 0 | 0 | 0 | 0 | 0 | 0 | 0 | 0 | 0 |
| MOR205-1 | 0 | 0 | 0 | −4.699 | 0 | 0 | 0 | 0 | 0 |
| MOR207-1 | 0 | 0 | 0 | 0 | 0 | 0 | 0 | 0 | 0 |
| MOR222-1 | 0 | 0 | 0 | 0 | 0 | 0 | 0 | 0 | 0 |
| MOR223-1 | 0 | 0 | 0 | 0 | 0 | 0 | 0 | 0 | 0 |
| MOR23-1 | 0 | 0 | 0 | 0 | 0 | 0 | 0 | −4.856 | 0 |
| MOR238-1 | 0 | 0 | 0 | 0 | 0 | −3.843 | 0 | 0 | 0 |
| MOR25-1 | 0 | 0 | −4.194 | 0 | 0 | 0 | 0 | 0 | 0 |
| MOR250-1 | 0 | 0 | 0 | 0 | 0 | 0 | 0 | 0 | 0 |
| MOR251-1 | −3.193 | 0 | 0 | 0 | 0 | 0 | 0 | 0 | 0 |
| MOR253-1 | −3.219 | 0 | 0 | 0 | 0 | 0 | 0 | 0 | 0 |
| MOR258-17 | −4.1 | 0 | −4.627 | 0 | 0 | 0 | 0 | 0 | 0 |
| MOR258-1 | −3.824 | 0 | 0 | 0 | 0 | 0 | 0 | 0 | 0 |
| MOR259-1 | 0 | 0 | 0 | 0 | 0 | 0 | 0 | 0 | 0 |
| MOR260-1 | 0 | 0 | −3.542 | 0 | 0 | 0 | 0 | 0 | 0 |
| MOR261-1 | 0 | 0 | 0 | 0 | 0 | 0 | 0 | 0 | 0 |
| MOR268-1 | 0 | 0 | 0 | 0 | 0 | −3.897 | 0 | 0 | 0 |
| MOR269-1 | 0 | 0 | 0 | 0 | 0 | 0 | 0 | 0 | 0 |
| MOR271-1 | −3.463 | 0 | 0 | −4.126 | −4.077 | 0 | 0 | 0 | −3.322 |
| M0R272-1 | −3.254 | 0 | 0 | −4.447 | −5.25 | 0 | 0 | 0 | 0 |
| MOR273-1 | −3.208 | 0 | 0 | −4.441 | −5.761 | 0 | 0 | 0 | 0 |
| MOR277-1 | −3.568 | 0 | 0 | 0 | 0 | 0 | 0 | 0 | 0 |
| MOR30-1 | 0 | −4.033 | −4.987 | 0 | 0 | 0 | 0 | −3.575 | 0 |
| MOR31-1 | 0 | 0 | 0 | 0 | 0 | 0 | 0 | −5.2 | 0 |
| MOR33-1 | 0 | 0 | −4.487 | 0 | 0 | 0 | 0 | −4.148 | 0 |
| MOR37-1 | 0 | −3.477 | −4.323 | 0 | 0 | 0 | 0 | 0 | 0 |
| MOR4-1 | 0 | 0 | 0 | 0 | 0 | 0 | 0 | 0 | −3.231 |
| MOR40-1 | 0 | 0 | −4.121 | 0 | 0 | 0 | 0 | 0 | 0 |
| MOR41-1 | −3.456 | 0 | 0 | −3.766 | 0 | 0 | 0 | 0 | 0 |
| MOR5-1 | 0 | 0 | −3.749 | 0 | 0 | 0 | 0 | −3.583 | 0 |
| MOR9-1 | 0 | 0 | 0 | 0 | 0 | 0 | 0 | 0 | 0 |
| OR10J5 | 0 | 0 | 0 | 0 | 0 | 0 | 0 | 0 | 0 |
| OR1A1 | 0 | 0 | 0 | −7.242 | 0 | −3.467 | 0 | 0 | 0 |
| OR2C1 | 0 | 0 | 0 | 0 | 0 | 0 | 0 | 0 | 0 |
| OR2J2 | 0 | 0 | 0 | 0 | 0 | 0 | 0 | 0 | 0 |
| OR2M7 | 0 | 0 | 0 | 0 | 0 | −3.203 | 0 | 0 | 0 |
| OR2W1 | 0 | 0 | −3.758 | −4.246 | 0 | −4.736 | −4.056 | 0 | −5.102 |
| OR51E1 | 0 | 0 | 0 | 0 | 0 | 0 | 0 | 0 | 0 |
| OR51E2 | 0 | 0 | 0 | 0 | 0 | 0 | 0 | 0 | 0 |
| OR51L1 | 0 | 0 | 0 | 0 | 0 | 0 | 0 | 0 | 0 |
| OR5P3 | 0 | 0 | 0 | 0 | 0 | 0 | 0 | 0 | 0 |

| | Hexanoic acid | Hexyl acetate | Lyral | Nonanal | Nonanethiol | Nonanoic acid | Octanal | Octanethiol | Octanoic acid |
|---|---|---|---|---|---|---|---|---|---|
| MOR1-1 | −4.625 | 0 | 0 | 0 | 0 | 0 | 0 | 0 | 0 |
| MOR105-1 | 0 | 0 | 0 | 0 | 0 | 0 | 0 | 0 | 0 |
| MOR106-1 | 0 | 0 | 0 | 0 | 0 | 0 | 0 | 0 | 0 |
| MOR107-1 | 0 | 0 | 0 | 0 | 0 | 0 | 0 | 0 | 0 |
| MOR128-2 | 0 | 0 | 0 | 0 | 0 | 0 | 0 | 0 | 0 |
| MOR129-1 | 0 | 0 | 0 | 0 | 0 | 0 | 0 | 0 | 0 |
| MOR138-1 | 0 | 0 | 0 | 0 | 0 | 0 | 0 | 0 | 0 |
| MOR139-1 | 0 | 0 | 0 | 0 | 0 | 0 | 0 | 0 | 0 |
| MOR140-1 | 0 | 0 | 0 | 0 | 0 | 0 | 0 | 0 | 0 |
| MOR15-1 | 0 | 0 | 0 | 0 | 0 | 0 | 0 | 0 | 0 |
| MOR161-1 | 0 | 0 | 0 | 0 | 0 | 0 | 0 | 0 | 0 |
| MOR162-1 | 0 | 0 | 0 | 0 | 0 | 0 | 0 | 0 | 0 |
| MOR170-1 | 0 | 0 | 0 | 0 | 0 | 0 | 0 | 0 | 0 |
| MOR18-1 | 0 | 0 | 0 | 0 | 0 | −4.077 | 0 | 0 | 0 |
| MOR180-1 | 0 | 0 | 0 | 0 | 0 | 0 | 0 | 0 | 0 |
| MOR182-1 | 0 | 0 | 0 | 0 | 0 | 0 | 0 | 0 | 0 |
| MOR184-1 | 0 | 0 | 0 | 0 | 0 | 0 | 0 | 0 | 0 |
| MOR185-1 | 0 | 0 | 0 | 0 | 0 | 0 | 0 | 0 | 0 |
| MOR189-1 | 0 | 0 | 0 | 0 | 0 | 0 | 0 | 0 | 0 |
| MOR2-1 | 0 | 0 | 0 | 0 | 0 | 0 | 0 | 0 | 0 |
| MOR203-1 | 0 | 0 | 0 | 0 | −3.528 | −3.478 | 0 | −3.356 | 0 |
| MOR204-6 | 0 | 0 | 0 | 0 | 0 | 0 | 0 | 0 | 0 |
| MOR205-1 | 0 | 0 | 0 | 0 | 0 | 0 | 0 | 0 | 0 |
| MOR207-1 | 0 | 0 | 0 | 0 | 0 | 0 | 0 | 0 | 0 |
| MOP222-1 | 0 | 0 | 0 | 0 | 0 | 0 | 0 | 0 | 0 |
| MOR223-1 | 0 | 0 | 0 | 0 | 0 | 0 | 0 | 0 | 0 |
| MOR23-1 | 0 | 0 | 0 | 0 | 9 | 0 | 0 | 0 | −5.053 |
| MOR236-1 | 0 | 0 | 0 | 0 | 0 | 0 | 0 | 0 | 0 |
| MOR25-1 | 0 | 0 | 0 | 0 | 0 | 0 | 0 | 0 | −3.689 |
| MOR250-1 | 0 | 0 | 0 | 0 | 0 | 0 | 0 | 0 | 0 |
| MOR251-1 | 0 | 0 | 0 | 0 | 0 | 0 | 0 | 0 | 0 |
| MOR253-1 | 0 | 0 | 0 | 0 | 0 | 0 | 0 | 0 | 0 |
| MOR256-17 | 0 | 0 | −4.255 | 0 | 0 | −4.694 | 0 | −4.388 | −4.41 |
| MOR258-1 | 0 | 0 | 0 | 0 | 0 | 0 | 0 | 0 | 0 |
| MOR259-1 | 0 | 0 | 0 | 0 | 0 | 0 | 0 | 0 | 0 |
| MOR260-1 | 0 | 0 | 0 | 0 | −4.488 | −4.108 | 0 | 0 | 0 |
| MOR261-1 | 0 | 0 | 0 | 0 | −3.376 | 0 | 0 | 0 | 0 |
| MOR268-1 | 0 | 0 | 0 | 0 | −3.589 | 0 | 0 | 0 | 0 |
| MOR269-1 | 0 | 0 | 0 | 0 | 0 | 0 | 0 | 0 | 0 |
| MOR271-1 | 0 | 0 | 0 | 0 | 0 | 0 | 0 | 0 | 0 |
| MOR272-1 | 0 | 0 | 0 | 0 | 0 | 0 | 0 | 0 | 0 |
| MOR273-1 | 0 | 0 | 0 | 0 | 0 | 0 | 0 | 0 | 0 |
| MOR277-1 | 0 | 0 | 0 | 0 | 0 | 0 | 0 | 0 | 0 |
| MOR30-1 | 0 | 0 | 0 | −3.914 | 0 | −4.396 | 0 | 0 | −3.68 |
| MOR31-1 | 0 | 0 | 0 | 0 | 0 | 0 | 0 | 0 | 0 |
| MOR33-1 | 0 | 0 | 0 | −3.234 | 0 | −4.606 | 0 | 0 | −4.212 |
| MOR37-1 | 0 | 0 | 0 | −3.295 | 0 | −3.9 | 0 | 0 | 0 |
| MOR4-1 | 0 | 0 | 0 | 0 | 0 | 0 | 0 | 0 | 0 |
| MOR40-1 | 0 | 0 | 0 | −3.194 | 0 | −4.128 | 0 | 0 | −3.617 |
| MOR41-1 | 0 | 0 | 0 | 0 | 0 | 0 | 0 | 0 | 0 |
| MOR5-1 | 0 | 0 | 0 | 0 | 0 | −4.029 | 0 | 0 | −3.711 |
| MOR9-1 | 0 | 0 | 0 | 0 | 0 | 0 | 0 | 0 | 0 |
| OR10J5 | 0 | 0 | −3.489 | 0 | 0 | 0 | 0 | 0 | 0 |
| OR1A1 | 0 | 0 | 0 | 0 | −3.243 | 0 | 0 | −3.226 | 0 |
| OR2C1 | 0 | 0 | 0 | 0 | −3.893 | 0 | 0 | −4.051 | 0 |
| OR2J2 | 0 | 0 | 0 | 0 | 0 | 0 | 0 | 0 | 0 |
| OR2M7 | 0 | 0 | 0 | 0 | 0 | 0 | 0 | 0 | 0 |
| OR2W1 | 0 | −4.863 | 0 | −3.598 | −4.065 | −3.723 | −4.361 | −4.033 | −4.847 |
| OR51E1 | 0 | 0 | 0 | 0 | 0 | −3.609 | 0 | 0 | 0 |
| OR51E2 | 0 | 0 | 0 | 0 | 0 | 0 | 0 | 0 | 0 |
| OR51L1 | −3.834 | 0 | 0 | 0 | 0 | 0 | 0 | 0 | 0 |
| OR5P3 | 0 | 0 | 0 | 0 | 0 | 0 | 0 | 0 | 0 |

| | Pentanoic acid | Phenyl acetate | Phenyl acetate | Propionic acid | Vanillic acid | α-Caprotactone |
|---|---|---|---|---|---|---|
| MOR1-1 | −4.813 | 0 | 0 | 0 | 0 | 0 |
| MOR105-1 | 0 | 0 | 0 | 0 | 0 | 0 |
| MOR106-1 | 0 | −3.874 | 0 | 0 | 0 | 0 |
| MOR107-1 | 0 | 0 | 0 | 0 | 0 | 0 |
| MOR128-2 | 0 | 0 | 0 | 0 | 0 | 0 |
| MOR129-1 | 0 | 0 | 0 | 0 | 0 | 0 |
| MOR138-1 | 0 | 0 | 0 | 0 | 0 | 0 |
| MOR139-1 | 0 | −3.421 | −3.385 | 0 | 0 | 0 |
| MOR140-1 | 0 | 0 | 0 | 0 | 0 | 0 |
| MOR15-1 | 0 | 0 | 0 | 0 | −3.587 | 0 |
| MOR161-1 | 0 | 0 | 0 | 0 | 0 | 0 |
| MOR162-1 | 0 | 0 | 0 | 0 | 0 | 0 |
| MOR170-1 | 0 | 0 | 0 | 0 | 0 | 0 |
| MOR18-1 | 0 | 0 | 0 | 0 | 0 | 0 |
| MOR180-1 | 0 | 0 | −3.18 | 0 | 0 | 0 |
| MOR182-1 | 0 | 0 | 0 | 0 | 0 | 0 |
| MOR184-1 | 0 | 0 | 0 | 0 | 0 | 0 |
| MOR185-1 | 0 | 0 | 0 | 0 | 0 | −3.185 |
| MOR189-1 | 0 | 0 | 0 | 0 | 0 | 0 |
| MOR2-1 | 0 | 0 | 0 | 0 | 0 | 0 |
| MOR203-1 | 0 | −3.039 | −3.907 | 0 | 0 | −4.001 |
| MOR204-6 | 0 | 0 | 0 | 0 | 0 | 0 |
| MOR205-1 | 0 | 0 | 0 | 0 | 0 | 0 |
| MOR207-1 | 0 | 0 | 0 | 0 | 0 | 0 |
| MOR222-1 | 0 | 0 | 0 | 0 | 0 | 0 |
| MOR223-1 | 0 | −3.487 | 0 | 0 | 0 | 0 |
| MOR23-1 | 0 | 0 | 0 | 0 | 0 | 0 |
| MOR236-1 | 0 | 0 | 0 | 0 | 0 | 0 |
| MOR25-1 | 0 | 0 | 0 | 0 | 0 | 0 |
| MOR250-1 | 0 | −3.545 | 0 | 0 | 0 | 0 |
| MOR251-1 | 0 | 0 | 0 | 0 | 0 | 0 |
| MOR253-1 | 0 | 0 | 0 | 0 | 0 | 0 |
| MOR256-17 | 0 | 0 | 0 | 0 | 0 | 0 |
| MOR258-1 | 0 | 0 | −3.099 | 0 | 0 | −3.38 |
| MOR259-1 | 0 | 0 | 0 | 0 | 0 | 0 |
| MOR260-1 | 0 | 0 | 0 | 0 | 0 | 0 |
| MOR261-1 | 0 | 0 | 0 | 0 | 0 | 0 |
| MOR268-1 | 0 | 0 | 0 | 0 | 0 | 0 |
| MOR269-1 | 0 | 0 | 0 | 0 | 0 | 0 |
| MOR271-1 | 0 | 0 | −5.033 | 0 | 0 | −3.18 |
| MOR272-1 | 0 | 0 | −5.098 | 0 | 0 | −3.272 |
| MOR273-1 | 0 | 0 | 0 | 0 | 0 | 0 |
| MOR277-1 | 0 | 0 | 0 | 0 | 0 | 0 |
| MOR30-1 | 0 | 0 | 0 | 0 | 0 | 0 |
| MOR31-1 | 0 | 0 | 0 | 0 | 0 | 0 |
| MOR33-1 | 0 | 0 | 0 | 0 | 0 | 0 |
| MOR37-1 | 0 | 0 | 0 | 0 | 0 | 0 |
| MOR4-1 | 0 | 0 | 0 | 0 | 0 | 0 |
| MOR40-1 | 0 | 0 | 0 | 0 | 0 | 0 |
| MOR41-1 | 0 | −4.143 | 0 | 0 | 0 | 0 |
| MOR5-1 | 0 | 0 | 0 | 0 | 0 | 0 |
| MOR9-1 | 0 | 0 | 0 | 0 | −6.334 | 0 |
| OR10J5 | 0 | 0 | 0 | 0 | 0 | 0 |
| OR1A1 | 0 | 0 | 0 | 0 | 0 | 0 |
| OR2C1 | 0 | 0 | 0 | 0 | 0 | 0 |
| OR2J2 | 0 | 0 | 0 | 0 | 0 | 0 |
| OR2M7 | 0 | 0 | 0 | 0 | 0 | 0 |
| OR2W1 | 0 | 0 | −4.071 | 0 | 0 | 0 |
| OR51E1 | 0 | 0 | 0 | 0 | 0 | 0 |
| OR51E2 | 0 | 0 | 0 | −3.963 | 0 | 0 |
| OR51L1 | 0 | 0 | 0 | 0 | 0 | 0 |
| OR5P3 | 0 | 0 | 0 | 0 | 0 | 0 |

[symbol]

indicates data missing or illegible when filed

TABLE 5

100-06-1
100-09-4
10022-28-3
10024-56-3
10024-57-4
10024-64-3
10024-97-2
1002-84-2
1003-04-9
10031-71-7
10031-82-0
10031-86-4
10031-87-5
10031-88-6
10031-90-0
10031-92-2
10031-93-3
10031-96-6
10032-00-5
10032-02-7
10032-05-0
10032-08-3
10032-13-0
10032-15-2
10039-39-1
100-42-5
100-51-6
100-52-7
100-53-8
10058-43-2
1006-27-5
100-66-3
100-68-5
10072-05-6
100-86-7
10094-34-5
10094-36-7
10094-41-4
101-39-3
101-41-7
101-48-4
101-49-5
10152-76-8
101-81-5
101-84-8
101-85-9
101-86-0
101-94-0
101-97-3
102-04-5
102-13-6
102-16-9
102-17-0
102-19-2
102-20-5
102-22-7
102369-06-2
102-69-2
102-76-1
103-05-9
103-07-1
103-13-9
10321-71-8
103-25-3
103-26-4
103-28-6
103-36-6
103-37-7
103-38-8
10339-55-6
10340-23-5
103-41-3
103-45-7
103-48-0
103-50-4
103-52-6
103-53-7
103-54-8
103-56-0
103-58-2
103-59-3
103-60-6
103-61-7
103-64-0
103694-68-4
103-82-2
103-93-5
103-95-7
10402-33-2
10402-47-8
10402-48-9
10402-52-5
104-09-6
10414-68-3
10415-87-9
10415-88-0
104-20-1
104-21-2
104-45-0
104-50-7
104-53-0
104-54-1
104-55-2
104-57-4
104-61-0
10461-98-0
104-62-1
104-64-3
104-65-4
104-67-6
104691-41-0
10471-14-4
10471-96-2
104-76-7
10482-55-0
10482-56-1
10482-77-6
10482-79-8
10484-09-0
10484-36-3
10486-14-3
10486-19-8
104-87-0
104-90-5
104-93-8
104986-28-9
105-01-1
105-13-5
10519-11-6
10519-33-2
105-21-5
10521-91-2
10522-18-6
105-37-3
105-43-1
10544-63-5
105463-44-3
105-53-3
105-54-4
105-57-7
105-60-2
105-66-8
105-68-0
105-79-3
10580-25-3
105-82-8
105-85-1
105-86-2
105-87-3
10588-10-0
10588-15-5
105-89-5
105-90-8
105-91-9
105-95-3
10599-70-9
106-02-5
106-18-3
106-21-8
106-22-9
106-23-0
106-24-1
106-25-2
106-26-3
106-27-4
106-28-5
106-29-6
106-30-9
106-32-1
106-33-2
106-35-4
106-36-5
106-44-5
106-65-0
106-68-3
106-70-7
106-72-9
106-73-0
107-03-9
107-10-8
1072-83-9
1073-11-6
1073-26-3
1073-29-6
107-35-7
107-41-5
107-43-7
1076-56-8
107-74-4
107-75-5
107-85-7
107-86-8
107-87-9
107898-54-4
1079-01-2
107-92-6
107-95-9
1080-12-2
108-10-1
108-21-4
108-22-5
108-39-4
108-47-4
108-48-5
108-50-9
108-64-5
108-82-7
108-83-8
108-94-1
108-95-2
108-98-5
109-05-7
109-08-0
109-15-9
109-19-3
109-20-6
109-21-7
109-25-1
109-29-5
109-42-2
109-52-4
109537-55-5
109-60-4
109-73-9
109-79-5
109-80-8
109-94-4
109-95-5
109-97-7
110-15-6
110-17-8
110-19-0
110-27-0
11031-45-1
110-38-3
110-39-4
110-40-7
110-41-8
110-42-9
110-43-0
110-44-1
110-45-2
110458-85-0
11050-62-7
110-58-7
110-62-3
110-66-7
110-74-7
110-81-6
110-85-0
110-86-1
110-89-4
110-93-0
110-98-5
111-11-5
111-12-6
111-13-7
111-14-8
111-26-2
111-27-3
111-28-4
111-30-8
1113-13-9
111-31-9
1113-21-9
1113-60-6
111-47-7
1115-11-3
111-66-0
111-70-6
111-71-7
1117-55-1
1117-61-9
111-79-5
111-80-8
111-81-9
111-82-0
1118-27-0
1118-39-4
111-87-5
111-90-0
1119-06-8
1119-44-4
112-05-0
112-06-1
112-12-9
112-14-1
112-17-4
112-19-6
112-23-2
1122-54-9
1122-62-9
112-30-1
112-31-2
112-32-3
112-37-8
1123-85-9
112-38-9
1124-11-4
112-42-5
112-43-6
112-44-7
112-45-8
1125-21-9
112-53-8
112-54-9
1125-88-8
112-63-0
112-66-3
112-80-1
1128-08-1
112-92-5
1129-47-1
1131-62-0
113486-29-6
113889-23-9
1139-30-6
1142-85-4
1153-51-1
115-95-7
115-99-1
116-02-9
116-26-7
116-53-0
117013-33-9
117933-89-8
117-98-6
1184-78-7
118-55-8
118-58-1
118-60-5
118-61-6
118-71-8
118-72-9
1188-02-9
1189-09-9
118-93-4
1191-16-8
1191-43-1
1191-62-4
1192-58-1
1192-62-7
1193-11-9
1193-18-6
119-36-8
1193-79-9
1195-32-0
119-53-9
1196-01-6
119-61-9
119-65-3
1197-01-9
119-84-6
1200-67-5
120-11-6
120-14-9
120-24-1
120-45-6
120-50-3
120-51-4
1205-17-0
120-57-0
120-72-9
120-92-3
1209-61-6
121-00-6
1211-29-6
121251-67-0
121251-68-1
121-32-4
121-33-5
121-34-6
121-39-1
121-44-8
121-79-9
121-98-2
122-00-9
122-03-2
1222-05-5
122-40-7
122-43-0
122-44-1
122-45-2
122-48-5
122-57-6
122-59-8
12262-03-2
122-63-4
122-67-8
122-68-9
122-69-0
122-70-3
122-72-5
122-73-6
122-74-7
122-78-1
122-79-2
122-84-9
122-91-8
122-97-4
122-99-6
123-07-9
123-08-0
123-11-5
123-15-9
123-19-3
123-25-1
123-29-5
123-32-0
123-35-3
123-38-6
123-51-3
123-54-6
123-63-7
123-66-0
123-68-2
123-72-8
123-75-1
123-76-2
123-86-4
123-96-6
124-04-9
124-06-1
124-07-2
124-10-7
124-12-9
124-13-0
124-19-6
124-25-4
124-76-5
125109-85-5
125-12-2
125352-06-9
126-64-7
126-91-0
127-17-3
127-41-3
127-42-4
127-43-5
127-51-5
127-91-3
128119-70-0
128-37-0
128-50-7
128-51-8
13002-09-0
13019-20-0
13019-22-2
13074-63-0
13074-65-2
13109-70-1
13112-65-7
13162-46-4
13171-00-1
131766-73-9
131812-67-4
13184-86-6
1319-88-6
1321-30-8
13215-88-8
1321-89-7
1322-17-4
1322-34-5
1322-58-3
1323-00-8
13246-52-1
13254-34-7
13257-44-8
133-18-6
1331-92-6
13327-56-5
1333-58-0
133-37-9
13341-72-5
1334-78-7
1334-82-3
13351-61-6
1335-44-0
1335-46-2
1335-66-6
13360-64-0
1337-83-3
134123-93-6
13419-69-7
134-20-3
134-28-1
13442-90-5
134454-31-2
13466-78-9
134769-33-8
13477-62-8
13481-87-3
13491-79-7
13494-06-9
13494-07-0
134-96-3
135-02-4
13532-18-8
13552-96-0
13567-39-0
135-79-5
13623-11-5
1365-19-1
136-60-7
13678-58-5
13678-59-6
13678-60-9
13678-67-6
13678-68-7
13679-46-4
13679-61-3
13679-70-4
13679-85-1
13679-86-2
136954-20-6
136954-21-7
136954-22-8
137-00-8
137-03-1
137-06-4
13706-86-0
13708-12-8
137-32-6
13794-15-5
13794-73-5
13816-33-6
138-22-7
138-23-8
13828-37-0
13851-11-1
13877-91-3
13877-93-5
138-86-3
138-87-4
13894-63-8
13925-00-3
13925-03-6
13925-05-8
13925-06-9
13925-07-0
139-45-7
139504-68-0
13952-84-6
139-70-8
13991-37-2
140-10-3
140-11-4
140-25-0
140-26-1
140-27-2
140-39-6
1405-92-1
140-67-0
14073-97-3
140-88-5
141-06-0
141-09-3
14109-72-9
141-10-6
141-11-7
141-12-8
141-13-9
141-14-0
141-15-1
141-16-2
141-25-3
14129-48-7
14159-61-6
14173-25-2
141-78-6
141-79-7
141-92-4
141-97-9
142-19-8
142-60-9
142-62-1
142-83-6
142-91-6
142-92-7
143-07-7
143-08-8
14309-57-0
143-13-5
143-14-6
143-28-2
14360-50-0
14371-10-9
14374-92-6
1438-91-1
1438-94-4
14400-67-0
14436-32-9
144-39-8
14481-52-8
14481-55-1
145-39-1
14576-08-0
14595-54-1
1460-34-0
14620-52-1
14667-55-1
1470-50-4
147159-49-7
14735-72-9
14765-30-1
147-85-3
14812-03-4
14901-07-6
149982-46-7
150-30-1
150436-68-3
1504-55-8
1504-74-1
1504-75-2
1506-02-1
150-60-7
150-78-7
150-84-5
150-86-7
151-05-3
151-10-0
15111-96-3
15111-97-4
151-19-9
1516-17-2
15186-51-3
15323-35-0
1534-08-3
15356-74-8
15373-31-6
154171-76-3
154171-77-4
1551-44-6
156-06-9
1565-76-0
1565-81-7
15679-12-6
15679-13-7
15679-19-3
1569-60-4
15706-73-7
15707-23-0
15707-24-1
1575-74-2
15760-18-6
15764-16-6
1576-77-8
1576-78-9
1576-85-8
1576-87-0
1576-95-0
1577-18-0
1577-19-1
15986-80-8
1599-47-9
1599-49-1
1604-28-0
1608-72-6
16128-68-0
1617-23-8
1617-40-9
1618-26-4
16251-77-7
1629-58-9
1632-73-1
16356-11-9
1639-09-4
16409-43-1
16409-45-3
16409-46-4
16429-21-3
1646-26-0
16491-24-0
16491-25-1
16491-36-4
16491-54-6
16493-80-4
1653-30-1
16587-71-6
16630-52-7
16630-55-0
16630-60-7
16630-66-3
166432-52-6
1669-44-9
1670-47-9
1679-07-8
169054-69-7
16930-93-1
16930-96-4
16939-73-4
1706-12-3
1708-34-5
1708-35-6
1708-81-2
17092-92-1
17102-64-6
1725-01-5
17283-81-7
1728-46-7
1731-84-6
1731-86-8
1733-25-1
17369-59-4
17369-60-7
17369-61-8
17373-84-1
17373-89-6
17488-65-2
17511-60-3
1754-62-7
17587-33-6
1759-28-0
17597-95-4
17619-36-2
17699-14-8
1775-43-5
1786-08-9
17909-77-2
1797-74-6
180031-78-1
18031-40-8
18060-79-2
18096-62-3
18114-49-3
181258-87-7
18127-01-0
18138-03-9
18138-04-0
18138-05-1
18172-67-3
18189-02-1
18189-07-6
182699-77-0
18277-27-5
18318-83-7
18368-91-7
18383-49-8
18402-83-0
18409-17-1
18409-18-2
18409-20-6
18409-21-7
18433-93-7
18436-37-8
18479-51-1
18479-54-4
18479-57-7
18479-58-8
18485-38-6
18492-65-4
18640-74-9
1866-31-5
18679-18-0
1871-67-6
1875-89-4
18776-92-6
1878-18-8
18794-77-9
18794-84-8
18824-63-0
18829-55-5
18829-56-6
18836-52-7
1883-78-9
1885-38-7
188570-78-7
188590-62-7
18871-14-2
1888-90-0
18999-28-5
19009-56-4
1901-26-4
1901-38-8
19089-92-0
19139-31-2
19141-40-3
19224-26-1
19269-28-4
19317-11-4
19322-27-1
19342-01-9
1946-00-5
19487-61-7
196109-18-9
1963-36-6
1968-40-7
19700-21-1
19788-49-9
19819-98-8
198404-98-7
19870-74-7
19872-52-7
19902-08-0
20053-88-7
20125-81-9
20125-84-2
2021-28-5
202188-43-0
20279-51-0
20286-45-7
20298-69-5
20333-39-5
2035-99-6
2040-10-0
20407-84-5
2044-73-7
2046-17-5
20474-93-5
20489-53-6
2049-96-9
53329
2050-08-0
53570
2050-87-5
2051-78-7
2051-96-9
2052-14-4
2052-15-5
20582-85-8
20662-84-4
20665-85-4
20680-10-8
20691-52-5
20777-49-5
20780-48-7
20780-49-8
20834-59-7
2084-18-6
2084-19-7
20920-83-6
2100-17-6
21016-46-6
21063-71-8
2109-22-0
2110-18-1
2111-75-3
21129-27-1
211323-05-6
2114-33-2
21145-77-7
21188-58-9
2120-70-9
21280-29-5
2142-94-1
2153-26-6
2153-28-8
21593-77-1
21661-97-2
21662-09-9
21662-13-5
21662-16-8
21722-83-8
2173-56-0
2173-57-1
2177-77-7
2179-57-9
2179-58-0
2179-59-1
2179-60-4
21834-92-4
21835-01-8
2186-92-7
21948-70-9
21963-26-8
21964-44-3
2198-61-0
22014-48-8
22029-76-1
22030-19-9
22047-25-2
22094-00-4
22104-80-9
22104-81-0
2216-45-7
2216-51-5
2216-52-6
2216-81-1
2217-33-6
117731
2235-83-8
22418-66-2
2244-16-8
22457-23-4
2253-73-8
129176
22629-49-8
22694-96-8
2270-60-2
227456-27-1
227456-28-2
22771-44-4
2277-16-9
2277-19-2
2278-53-7
22810-10-2
22882-89-9
2294-76-0
146589
2305-25-1
2306-78-7
2306-88-9
2306-91-4
2307-10-0
2308-18-1
2311-46-8
2315-68-6
23267-57-4
23328-62-3
23333-91-7
233665-96-8
2344-70-9
2345-24-6
2345-26-8
2345-28-0
162721
2349-13-5
23495-12-7
2351-90-8
23550-40-5
2363-88-4
23696-85-7
23726-91-2
23747-43-5
23747-45-7
23747-48-0
23787-80-6
23787-90-8
23811-08-7
23832-18-0
2396-77-2
2396-78-3
2396-83-0
2396-84-1
2403-58-9
24048-14-4
2408-20-0
2408-37-9
2412-80-8
24168-70-5
2416-94-6
24237-00-1
24295-03-2
2432-51-1
2432-77-1
2432-91-9
24330-52-7
2435-16-7
2437-25-4
2437-95-8
2439-44-3
24401-36-3
196780
2444-46-4
2444-49-7
2445-67-2
2445-72-9
2445-76-3
2445-77-4
2445-78-5
2463-53-8
24653-75-6
24680-50-0
24683-00-9
24691-15-4
24717-85-9
24720-09-0
24817-51-4
24851-98-7
2497-18-9
2497-21-4
2500-83-6
25013-16-5
2511-00-4
25152-84-5
25152-85-6
2520-60-7
25225-08-5
25225-10-9
25265-71-8
25279-09-8
228916
25304-14-7
25312-34-9
25409-08-9
25415-62-7
25415-67-2
25435-63-6
25485-88-5
2548-87-0
2550-11-0
2550-26-7
2550-40-5
2550-52-9
25524-95-2
238419
25564-22-1
240883
25634-93-9
2565-82-4
25680-57-3
25680-58-4
2568-25-4
25773-40-4
2623-23-6
2628-17-3
26303-90-2
2630-39-9
2639-63-6
2639-68-1
26446-31-1
26446-32-2
26553-47-9
26643-91-4
2679-87-0
26912-64-1
27039-84-5
2705-87-5
297890
2721-22-4
27538-09-6
2756-56-1
2758-18-1
27593-23-3
27606-09-3
27625-35-0
27743-70-0
27817-67-0
27829-72-7
2785-87-7
2785-89-9
27939-60-2
28043-10-9
28059-72-9
28069-74-1
28217-92-7
28219-60-5
28219-61-6
28231-03-0
2835-39-4
28371-99-5
2847-30-5
28588-73-0
28588-74-1
28588-75-2
28631-86-9
28645-51-4
28664-35-9
2882-20-4
28839-13-6
288-47-1
28897-58-7
28940-11-6
29021-37-2
290-37-9
29214-60-6
29350-73-0
29414-47-9
29460-90-0
29548-14-9
29548-30-9
29606-79-9
29725-66-4
29759-11-3
29811-50-5
2983-36-0
2983-37-1
2983-38-2
2986-54-1
29895-73-6
29896-45-5
29926-41-8
29926-42-9
3008-43-3
30086-02-3
30100-15-3
3016-19-1
30168-23-1
3025-30-7
302-72-7
30310-41-9
3033-23-6
30361-28-5
30361-29-6
30390-50-2
30408-61-8
30418-89-4
30453-31-7
3054-92-0
30640-46-1
30673-38-2
30772-79-3
30895-79-5
30897-75-7
3100-36-5
31375-17-4
313973-37-4
31416-78-1
3142-66-3
3142-72-1
3149-28-8
31499-71-5
31499-72-6
31501-11-8
31502-14-4
31539-84-1
3155-71-3
31704-80-0
3188-00-9
31906-04-4
3194-17-0
3208-16-0
3208-40-0
3209-13-0
32210-23-4
32214-91-8
32388-55-9
3239-35-8
3239-37-0
488211
3240-29-7
3249-68-1
32659-21-5
326-61-4
32665-23-9
3268-49-3
32736-91-7
32737-14-7
32764-98-0
32803-39-7
328-50-7
3289-28-9
3293-47-8
32974-92-8
3301-90-4
3301-94-8
33046-81-0
33049-93-3
3338-55-4
334-48-5
334-49-6
33467-73-1
33467-74-2
33467-76-4
33467-79-7
33522-69-9
33662-58-7
33673-62-0
33673-65-3
33704-61-9
3386-97-8
33885-51-7
543088
3391-83-1
3391-86-4
33922-73-5
34047-39-7
3407-42-9
34131-98-1
34135-85-8
34291-99-1
34300-94-2
34322-09-3
34365-79-2
34413-35-9
34451-19-9
34495-71-1
3452-97-9
34545-88-5
3460-44-4
34685-67-4
34686-71-0
34687-46-2
34764-02-8
3487-99-8
3488-00-4
3489-28-9
34902-57-3
350-03-8
35044-57-6
35044-58-7
35044-59-8
35087-49-1
3508-98-3
35154-45-1
35158-25-9
35178-55-3
35205-76-6
35206-51-0
35234-22-1
35250-53-4
352-93-2
35448-31-8
35472-56-1
3549-23-3
3558-60-9
3564-98-5
609379
3581-91-7
3583-00-4
35852-41-6
35852-46-1
35854-86-5
35926-04-6
3600-24-6
622683
3613-30-7
36219-73-5
36267-71-7
36306-87-3
36431-72-8
36438-54-7
3658-77-3
3658-79-5
3658-80-8
3658-93-3
3661-77-6
36653-82-4
36701-01-6
36789-59-0
36806-46-9
3681-71-8
3681-82-1
3682-42-6
37160-77-3
37172-02-4
37172-05-7
37172-53-5
3720-16-9
3724-61-6
3724-65-0
3738-00-9
37514-30-0
37526-88-8
3760-11-0
37609-25-9
37617-03-1
37674-63-8
37677-14-8
3777-69-3
3777-71-7
3782-00-1
37837-44-8
37887-04-0
3796-70-1
37973-51-6
38205-60-6
38205-64-0
38223-29-9
38285-49-3
38325-25-6
38363-23-4
707902
38433-74-8
38446-21-8
38462-22-5
38462-23-6
3848-24-6
3856-25-5
38713-41-6
38917-61-2
38917-62-3
39026-94-3
39067-39-5
39067-80-6
3913-71-1
3913-80-2
3913-81-3
3915-83-1
39212-23-2
39251-86-0
39251-88-2
39252-02-3
39252-03-4
39255-32-8
3943-74-6
39481-28-2
39711-79-0
39736-25-9
39741-41-8
39748-49-7
39770-05-3
39872-57-6
39900-38-4
39924-52-2
40010-99-9
40018-26-6
40188-41-8
40203-73-4
4023-65-8
40348-72-9
40527-42-2
40654-82-8
40716-66-3
4077-47-8
40785-62-4
40789-98-8
40790-04-3
40853-53-0
40853-56-3
40878-72-6
40910-49-4
40923-64-6
40942-73-2
4112-89-4
41199-19-3
41239-48-9
41270-80-8
41453-56-9
41496-43-9
41519-18-0
41519-23-7
41547-22-2
41653-97-8
4166-20-5
41724-19-0
4180-23-8
41816-03-9
41820-22-8
41847-88-5
41890-92-0
42075-45-6
42078-65-9
4208-49-5
4208-57-5
4230-97-1
42348-12-9
42370-07-0
42436-07-7
42474-44-2
4253-89-8
42604-12-6
426218-78-2
4265-16-1
4265-97-8
42822-86-6
42824-62-4
42919-64-2
43039-98-1
43040-01-3
431-03-8
4312-99-6
879933
43219-68-7
432-25-7
894025
4351-54-6
4359-31-3
4359-47-1
4359-57-3
4360-47-8
4361-23-3
4362-22-5
898649
4395-92-0
4410-99-5
4411-89-6
4426-79-3
4430-31-3
4430-36-8
4430-39-1
4430-42-6
4433-36-7
4437-20-1
4437-22-3
4437-51-8
443-79-8
4440-65-7
4442-79-9
4455-13-4
4466-24-4
4493-42-9
4500-58-7
4501-58-0
45019-28-1
4532-64-3
4536-23-6
4573-50-6
4586-22-5
459-80-3
4602-84-0
4606-15-9
992463
995835
4630-82-4
4634-89-3
4643-25-8
4643-27-0
464-43-7
464-45-9
464-49-3
465-24-7
4674-50-4
4695-62-9
469-61-4
470-67-7
4707-47-5
470-82-6
472-66-2
4728-82-9
472-97-9
473-15-4
4732-13-2
473-67-6
4740-79-8
1038568
4748-78-1
475-03-6
475-20-7
4798-44-1
4798-61-2
4819-67-4
4826-62-4
4861-58-9
4861-85-2
4864-61-3
488-10-8
4883-60-7
489-40-7
489-86-1
490-03-9
4906-24-5
491-04-3
491-07-6
491-09-8
4927-39-3
4938-52-7
1109189
4948-28-1
494-90-6
495-40-9
495-62-5
495-76-1
49576-57-0
496-77-5
497-03-0
497-23-4
49776-81-0
498-00-0
498-02-2
498-81-7
499-12-7
499-44-5
499-54-7
499-70-7
499-75-2
500-02-7
5009-32-5
501-52-0
501-92-8
50-21-5
502-47-6
502-61-4
502-69-2
502-72-7
50373-36-9
503-74-2
505-10-2
505-29-3
505-32-8
505-57-7
505-79-3
50607-64-2
50623-57-9
50626-02-3
50-69-1
50-70-4
507-09-5
50746-10-6
507-70-0
5077-67-8
50816-18-7
50-81-7
5090-41-5
51100-54-0
51115-67-4
51154-96-2
512-13-0
5132-75-2
513-44-0
51352-68-2
5137-52-0
513-86-0
5146-66-7
515-00-4
51532-26-4
51534-66-8
51566-62-2
515-69-5
51595-91-6
516-06-3
51608-18-5
51652-47-2
5166-53-0
51-67-2
51755-66-9
51755-83-0
51755-85-2
5182-36-5
1205849
1205978
52210-18-1
5240-32-4
52474-60-9
52517-67-6
52557-97-8
5271-38-5
527-60-6
52789-73-8
5287-45-6
52-90-4
5292-21-7
53018-24-9
53046-97-2
53053-51-3
531-26-0
531-59-9
5320-75-2
53243-59-7
53243-60-0
53263-58-4
5328-37-0
5331-14-6
5331-32-8
533-18-6
53338-05-9
53398-78-0
53398-80-4
53398-83-7
53398-85-9
53398-86-0
53398-87-1
53399-81-8
53405-97-3
534-15-6
534-22-5
53448-07-0
53475-15-3
53488-14-5
5349-62-2
53498-32-1
5362-56-1
536-50-5
536-59-4
536-60-7
536-78-7
53767-93-4
53833-30-0
53833-32-2
538-65-8
538-85-3
53889-39-7
5392-40-5
539-30-0
5396-89-4
539-82-2
539-88-8
539-90-2
540-07-8
540-18-1
540-42-1
5405-41-4
5405-58-3
1279415
540-63-6
5406-58-6
54082-68-7
54089-83-7
541-31-1
541-35-5
5413-60-5
541-47-9
541-58-2
5418-86-0
541-91-3
1284897
5421-17-0
5421-27-2
5422-34-4
542-46-1
542-55-2
5426-78-8
542-85-8
54300-08-2
54300-09-3
543-39-5
54340-90-8
5434-57-1
543-49-7
5435-64-3
5436-21-5
54393-36-1
54411-06-2
5442-00-2
544-40-1
54440-17-4
544-63-8
54464-57-2
54464-59-4
54484-73-0
5451-52-5
5451-80-9
5451-88-7
5451-95-6
1296065
1296855
1296920
5454-19-3
5454-21-7
5454-28-4
54546-26-8
5457-70-5
5458-59-3
1299385
1299690
54644-28-9
546-49-6
1301153
546-79-2
1301880
5471-51-2
547-63-7
54814-64-1
54815-13-3
54830-99-8
548774-80-7
54889-48-4
54947-74-9
54957-02-7
54982-83-1
55066-48-3
55066-49-4
55066-56-3
551-08-6
551-93-9
55253-28-6
554-12-1
55418-52-5
5552-30-7
5555-90-8
556-24-1
556-61-6
556-82-1
557-00-6
55704-78-4
55719-85-2
557-48-2
55764-22-2
55764-23-3
55764-25-5
55764-28-8
5577-44-6
5579-78-2
5595-79-9
56011-02-0
560-88-3
56-12-2
5616-51-3
56172-46-4
562-74-3
56-40-6
564-20-5
564-94-3
5655-61-8
5660-60-6
56700-78-8
56747-96-7
56767-18-1
56805-23-3
56-81-5
56836-93-2
56-84-8
56-85-9
56-86-0
56-87-1
56922-74-8
5694-72-4
56973-85-4
57-06-7
57074-37-0
57082-24-3
57094-40-3
57-10-3
57-11-4
57124-87-5
5724-81-2
57345-19-4
57378-68-4
57500-00-2
57-55-6
5756-24-1
57568-60-2
57576-09-7
5760-50-9
576-26-1
5764-85-2
577-16-2
57743-63-2
578-58-5
57893-27-3
579-07-7
57934-97-1
1420859
1420891
579-74-8
579-75-9
579-93-1
58-08-2
58214-97-4
58296-81-4
583-04-0
583-60-8
5837-78-5
583-92-6
58430-94-7
585-25-1
58567-11-6
585-84-2
58625-96-0
586-38-9
586-62-9
586-81-2
586-82-3
5870-58-8
5870-93-9
58-86-6
588-67-0
589-35-5
58936-30-4
589-38-8
589-59-3
589-66-2
589-75-3
589-82-2
58985-18-5
589-92-4
589-98-0
590-01-2
59020-85-8
59020-90-5
59021-02-2
59052-82-3
5905-46-4
5905-47-5
59056-62-1
59056-64-3
59056-70-1
590-86-3
5910-87-2
5910-89-4
591-12-8
591-24-2
591-49-1
59151-19-8
591-60-6
591-68-4
591-80-0
591-82-2
59191-78-5
592-20-1
59230-57-8
5925-68-8
5925-75-7
59259-38-0
592-82-5
592-84-7
592-88-1
593-08-8
59323-76-1
59324-17-3
59354-71-1
59376-58-8
5943-34-0
59471-80-6
5947-36-4
1477529
59-51-8
59558-23-5
5986-38-9
598-75-4
5988-91-0
5989-27-5
5989-54-8
600-14-6
600-18-0
60047-17-8
60-12-8
60-18-4
60241-53-4
60241-55-6
6028-61-1
6032-29-7
60-33-3
60335-71-9
60-35-5
60415-61-4
60523-21-9
606-45-1
6066-49-5
60763-41-9
60788-25-2
607-90-9
60-82-2
60826-15-5
6091-50-5
611-13-2
61114-24-7
61197-09-9
612-15-7
61295-41-8
61295-44-1
61295-50-9
61295-51-0
613-70-7
61444-38-0
61444-41-5
614-99-3
615-10-1
616-25-1
61692-83-9
61692-84-0
61699-38-5
617-01-6
617-35-6
617-50-5
6175-49-1
61792-11-8
61810-55-7
61826-53-7
619-01-2
61-90-5
6191-71-5
61920-45-4
61931-80-4
61931-81-5
620-02-0
620-23-5
620-79-1
62079-29-2
62147-49-3
621-82-9
6221-93-8
6222-35-1
622-39-9
622-45-7
622-62-8
622-78-6
623-05-2
623-15-4
623-17-6
623-19-8
623-21-2
623-22-3
623-30-3
623-36-9
623-37-0
623-42-7
623-70-1
62395-45-3
624-09-9
624-24-8
62439-41-2
624-41-9
624-51-1
624-54-4
62488-56-6
624-89-5
624-92-0
625-33-2
625-55-8
625-60-5
62563-80-8
625-80-9
6258-63-5
625-86-5
6259-76-3
626-11-9
6263-65-6
626-38-0
626-77-7
626-82-4
1594715
6270-56-0
627-90-7
628-00-2
628-03-5
6281-40-9
6284-46-4
628-46-6
628-63-7
628-97-7
628-99-9
6290-17-1
6290-37-5
629-12-9
629-19-6
629-33-4
629-45-8
629-59-4
629-62-9
629-63-0
629-70-9
6297-41-2
6304-24-1
6309-51-9
6314-97-2
63187-91-7
1616205
63449-64-9
63449-68-3
63500-71-0
635-46-1
63759-55-7
637-64-9
637-65-0
63767-86-2
637-78-5
6378-65-0
6380-23-0
638-02-8
638-11-9
638-17-5
638-25-5
638-49-3
638-53-9
63-91-2
63986-03-8
64001-15-6
64-04-0
1647153
6413-26-9
64165-57-7
64-17-5
64-18-6
64187-83-3
64-19-7
64275-73-6
644-08-6
644-13-3
644-35-9
644-49-5
64461-99-0
645-13-6
6454-22-4
645-56-7
6457-30-3
64577-91-9
646-07-1
6485-40-1
6493-80-7
65113-95-3
65113-99-7
1683469
65155-45-5
65330-49-6
65405-67-6
65405-68-7
65405-70-1
65405-72-3
65405-73-4
65405-76-7
65405-77-8
65405-80-3
65405-84-7
65416-14-0
65423-25-8
65442-31-1
65443-14-3
65504-97-4
65505-16-0
65505-17-1
65505-18-2
65505-24-0
65505-25-1
65530-53-2
65588-69-4
6561-39-3
65620-50-0
656-53-1
65737-52-2
65813-53-8
65817-24-5
65-85-0
65887-08-3
65894-82-8
65894-83-9
659-70-1
66062-78-0
66068-84-6
66072-32-0
6622-76-0
6624-71-1
66-25-1
6627-88-9
6628-18-8
66327-54-6
6635-22-9
1729185
66408-78-4
66576-71-4
6658-48-6
66634-97-7
66642-86-2
66848-40-6
67028-40-4
6707-60-4
6725-64-0
6728-26-3
6728-31-0
67355-38-8
6738-23-4
67452-27-1
675-09-2
6753-98-6
67601-05-2
67-63-0
67633-94-7
67633-96-9
67633-97-0
67633-99-2
67634-00-8
67634-01-9
67634-07-5
67634-11-1
67634-14-4
67634-15-5
67634-17-7
67634-20-2
67634-22-4
67634-23-5
67634-25-7
67534-26-8
67-54-1
67662-96-8
67663-01-6
67674-36-6
67674-46-8
67-68-5
67689-50-3
67707-75-9
67715-79-1
67715-80-4
67739-11-1
67746-30-9
67770-79-0
67785-76-6
67785-77-7
67801-20-1
67801-33-6
67801-38-1
67801-44-9
67801-47-2
67801-64-3
67801-65-4
6784-13-0
67845-30-1
67845-42-5
67845-46-9
67859-96-5
67860-38-2
67874-67-3
67874-69-5
67874-72-0
67874-78-6
67874-81-1
67879-60-1
67883-79-8
6789-80-6
6789-88-4
67905-40-2
6790-58-5
67919-67-9
67920-63-2
67952-59-4
67952-60-7
67952-65-2
67999-56-8
6803-40-3
68039-24-7
68039-26-9
68039-29-2
68039-39-4
68039-44-1
68039-47-4
68039-49-6
68039-69-0
68039-73-6
68083-58-9
68084-03-7
68084-04-8
68127-22-0
68132-80-9
68133-72-2
68133-73-3
68133-75-5
68133-76-6
68133-77-7
68133-78-8
68133-79-9
68140-48-7
68141-17-3
68155-66-8
68155-67-9
68213-87-6
68258-95-7
68259-33-6
68345-22-2
68378-13-2
68391-29-7
68391-39-9
68398-18-5
68411-38-1
68419-46-5
68480-06-8
68480-08-0
68480-11-5
68480-14-8
68480-15-9
68480-25-1
68480-26-2
68480-27-3
68480-28-4
68527-74-2
68527-76-4
68527-77-5
68555-53-3
68555-57-7
68555-58-8
68555-59-9
68555-61-3
68555-62-4
68555-63-5
68555-65-7
68555-94-2
68555-95-3
68683-20-5
68683-25-0
68698-57-7
68698-59-9
68705-63-5
68738-94-3
68738-96-5
68738-99-8
68739-00-4
6876-13-7
68845-00-1
68845-02-3
68845-36-3
68877-29-2
688-82-4
68901-15-5
68901-22-4
68901-32-6
68922-10-1
68922-11-2
68928-82-5
68959-28-4
68966-86-9
689-67-8
689-89-4
68991-97-9
69038-78-4
69103-20-4
6911-51-9
6915-15-7
6920-22-5
69226-05-7
692-86-4
69300-15-8
6931-54-0
693-54-9
69382-62-3
693-95-8
69486-14-2
695-06-7
6963-56-0
69668-87-7
69-72-7
6975-60-6
6976-72-3
698-10-2
698-27-1
6986-51-2
698-76-0
69882-09-3
699-10-5
699-17-2
69925-33-3
69929-16-4
69929-17-5
70092-23-8
7011-83-8
70214-77-6
705-73-7
705-86-2
706-14-9
7070-15-7
707-29-9
70788-30-6
70851-60-4
70851-61-5
71-00-1
710-04-3
71048-82-3
71077-31-1
71159-90-5
71-23-8
71298-42-5
71-36-3
713-95-1
71-41-0
7143-69-3
7149-26-0
7149-29-3
7149-32-8
71500-37-3
1918228
71566-51-3
71566-53-5
71648-34-5
71660-03-2
71735-79-0
71832-76-3
72007-81-9
72089-08-8
72117-72-7
7212-44-4
7217-59-6
72-18-4
72214-23-4
72257-53-5
72403-67-9
72429-08-4
72437-56-0
72437-68-4
7251-61-8
72797-17-2
72854-42-3
72881-27-7
72894-12-3
7289-52-3
72928-51-9
72928-52-0
73003-91-5
1973383
73157-43-4
7335-26-4
7341-17-5
73545-18-3
73545-19-4
7351-80-0
7367-81-9
7367-82-0
7367-88-6
73757-27-4
7392-19-0
7403-42-1
74094-60-3
74094-61-4
74094-62-5
74094-63-6
7416-35-5
74338-72-0
74356-31-3
74367-97-8
74410-10-9
7452-79-1
7460-74-4
74758-91-1
74758-93-3
74-79-3
7492-37-7
7492-39-9
7492-41-3
7492-44-6
7492-45-7
7492-65-1
7492-66-2
7492-67-3
7492-69-5
7492-70-8
74-93-1
7493-57-4
7493-58-5
7493-59-6
7493-63-2
7493-65-4
7493-66-5
7493-68-7
7493-69-8
7493-71-2
7493-72-3
7493-74-5
7493-76-7
7493-78-9
7493-79-0
7493-80-3
7493-82-5
75-04-7
75048-15-6
75-07-0
75-08-1
75147-23-8
75-18-3
75-21-8
75-31-0
2056136
75-33-2
7540-51-4
7540-53-6
7541-49-3
7549-33-9
7549-37-3
7549-41-9
75-50-3
2063957
75853-49-5
759-05-7
76-09-5
762-26-5
762-29-8
76238-22-7
764-39-6
764-40-9
76-49-3
765-05-9
76-50-6
765-70-8
7664-38-2
76649-14-4
76649-16-6
76649-17-7
76649-22-4
76649-23-5
76649-26-8
766-92-7
76788-46-0
770-27-4
77118-93-5
77311-02-5
7732-18-5
774-55-0
77-53-2
77-54-3
7756-96-9
7764-50-3
77-70-3
7774-44-9
7774-47-2
7774-60-9
7774-65-4
77-74-7
7774-74-5
7774-79-0
7774-82-5
7774-96-1
7775-00-0
7775-38-4
7775-39-5
7778-83-8
7778-87-2
7778-96-3
7779-16-0
7779-17-1
7779-23-9
7779-30-8
7779-41-1
7779-50-2
7779-65-9
7779-70-6
7779-72-8
7779-73-9
7779-75-1
7779-77-3
7779-78-4
7779-80-8
7779-81-9
7779-94-4
2146322
77-83-8
7784-67-0
7784-98-7
77851-07-1
7785-33-3
7785-53-7
7785-53-9
7785-66-2
7786-29-0
7786-47-2
7786-48-3
7786-58-5
7786-61-0
7787-20-4
77-92-9
77-93-0
78-35-3
78-36-4
78-37-5
78417-28-4
78-59-1
78649-62-4
78-69-3
78-70-8
78-81-9
78-83-1
78-84-2
78-93-3
78-96-6
78-98-8
78989-37-4
79-09-4
79-20-0
79-31-2
79-42-5
79-69-6
79771-15-8
79-77-6
79-78-7
79-89-0
79915-74-5
79-92-5
8007-35-0
80118-08-5
80-25-1
80-26-2
80-27-3
80417-97-6
80449-58-7
80480-24-6
80-54-6
80-56-8
80-57-9
80-59-1
80823-07-0
80-62-6
80857-64-3
80-71-7
80858-47-5
80866-83-7
81-14-1
81-15-2
814-67-5
816-68-0
81782-87-6
81782-77-6
81783-01-9
81786-73-4
81925-81-7
821-41-0
821-55-6
82 [symbol] 85-41-9
823-22-3
82358-51-2
82481-14-1
825-51-4
82854-98-5
82784-84-7
828-26-2
83-34-1
83-66-9
83-67-0
84012-84-8
84029-92-5
84029-93-8
84434-18-4
84842-60-4
84842-61-5
84-88-2
84881-92-5
84897-09- [symbol]
84788-08- [symbol]
85136-08-7
85213-22-5
85351-07-1
85392-03-8
85508-08-3
85554-72-9
85568-87-0
85761-70-2
85-91-8
88241-90-9
88803-90-9
868-57-5
870-23-5
87081-04-9
87118-95-4
87-19-4
87-20-7
87-22-9
87-25-2
87-29-6
87-41-2
87-44-5
874-88-8
874-90-8
87641-23-4
87841-24-5
87-89-4
87731-18-8
87-91-2
88-09-5
88-15-3
881-68-5
882-33-7
88-29-9
88-41-5
88-59-7
88-84-8
89-47-4
89-48-5
89534-38-3
89-65-6
89-74-7
89780-08-3
89-78-1
89-79-2
89-81-6
89-82-7
89-83-8
89-88-1
89-88-3
90-02-8
9003-73-0
90-05-1
90-12-0
90-17-5
90397-38-9
90-42-6
90-43-7
90530-04-4
90-87-9
91009-40-8
91-10-1
91-16-7
91-22-5
91482-37-0
91-60-1
91-61-2
91-62-3
91-64-5
91-87-2
92048-48-5
92-48-8
92-52-4
925-78-0
92585-24-5
927-49-1
928-80-3
928-91-5
928-92-7
928-94-9
928-95-0
928-96-1
928-97-2
93-04-9
93-08-3
93-15-2
93-18-3
93-18-5
93-19-5
932-16-1
93-28-7
93-29-8
93-51-6
93-53-8
93-54-9
93-55-0
93-58-3
93-80-7
937-30-4
93762-35-7
93840-90-5
93-89-0
93905-03-4
93-91-4
939-21-9
93-92-5
93939-86-7
939-48-0
93952-58-0
93981-50-1
94-02-0
94021-42-8
94087-23-7
94087-83-9
94089-01-7
94089-02-8
94-13-3
94134-03-9
94159-31-6
94159-32-7
941-98-0
94201-19-1
94201-73-7
94-26-8
94278-27-0
94293-57-9
94-30-4
94346-09-5
94386-48-8
94405-15-2
94-46-2
94-47-3
94-48-4
94-50-8
94-62-2
94-85-0
950-33-4
95-16-9
95-21-8
95-41-0
95-48-7
95-85-8
95-87-4
959 [symbol] 2-14-4
9 [symbol] -04-8
9 [symbol] -15-1
96-17-3
96-28-4
96-48-0
96-54-8
97358-54-8
97358-55-9
97384-48-0
97-41-6
97-42-7
97-45-0
97-53-0
97-54-1
97-61-0
97-62-1
97-64-3
97-87-8
97752-28-8
97-85-8
97-87-0
97890-13-6
97-89-2
97-98-1
97-99-4
98-00-0
98-01-1
98-02-2
98-52-2
98-53-3
98-54-4
98-55-5
98-85-1
98-85-2
98-89-5
99-48-9
99583-29-6
996-97-4
99-72-9
99-76-3
99-83-2
99-85-4
99-86-5
99-87-6
99-93-4
999-40-6
99-96-7
300-57-2
391-78-6
1455-21-6
94805-33-1
938-79-4
4288-15-1
1076-38-6
130086-44-3
484-48-2
491-37-2
5324-05-0
553-86-6
71-43-2 [symbol]
-11-1
123-92-2
123-99-9
126-81-8
6033-23-4
6169-08-8
20487-40-5 [symbol]
indicates data missing or illegible when filed

TABLE 6

| | Position in | |
|---|---|---|
| Property | Alignment | Weight |
| Volume | 24 | 1 |
| Volume | 31 | 1 |
| Composition | 43 | 1 |
| Volume | 52 | 1 |
| Volume | 71 | 1 |
| Composition | 56 | 1 |
| Polarity | 107 | 1 |
| Composition | 140 | 1 |
| Polarity | 149 | 1 |
| Volume | 160 | 1 |
| Polarity | 171 | 1 |
| Polarity | 210 | 1 |
| Volume | 255 | 2 |
| Composition | 257 | 1 |
| Composition | 267 | 2 |
| Polarity | 276 | 2 |

### Example 2

[0110] Six odorants (FIG. 20) were tested at 6 concentrations (300 μM, 100 μM, 33 μM, 11 μM, 3.7 μM, and no odor) against the 62 receptors from data set described herein. The odorants used were:

### Quinoline (91-22-5)

[0111] 1,3-butanedithiol (24330-52-7)

### Pentadecalactone (106-02-5)

[0112] Geranyl linalool (113-21-9)
Hexyl octanoate (1117-55-1)
Octyl octanoate (2306-88-9)

[0113] The EC₅₀ for all 62×6 combinations was estimated as described previously. The odorant receptor model outputs the probability that an odorant activates a receptor. Using the new dataset described herein, the model has an AUC of 0.6.

### INCORPORATION BY REFERENCE

[0114] The entire disclosure of each of the patent documents and scientific articles referred to herein is incorporated by reference for all purposes.

[0115] All publications, patents, patent applications and accession numbers mentioned in the above specification are herein incorporated by reference in their entirety. Although the invention has been described in connection with specific embodiments, it should be understood that the invention as claimed should not be unduly limited to such specific embodiments. Indeed, various modifications and variations of the described compositions and methods of the invention will be apparent to those of ordinary skill in the art and are intended to be within the scope of the following claims.

We claim:

1. A method of identifying an odorant ligand for an odorant receptor, comprising:
a) comparing three or more amino acid property descriptors of an odorant receptor with three or more physicochemical properties of a plurality of odorants; and
b) identifying one or more odorant receptor for said odorant receptor based on said comparing.

2. The method of claim 1, wherein said physicochemical properties are selected from the group consisting of Harary H index, topological polar surface area using N, O polar contributions, leverage-weighted autocorrelation of lag 0/weighted by atomic polarizabilities, R autocorrelation of lag 6/weighted by atomic polarizabilities, topological polar surface area using N, O, S, P polar contributions, Radial Distribution Function—11.0/weighted by atomic masses, valence connectivity index chi-2, phenol/enol/carboxyl OH, R autocorrelation of lag 2/weighted by atomic Sanderson electronegativities, R maximal autocorrelation of lag 4/weighted by atomic masses, graph vertex complexity index, Geary autocorrelation—lag 1/weighted by atomic masses, Ha attached to C3(sp3)/C2(sp2)/C3(sp2)/C3(sp), molecular path count of order 04, leverage-weighted autocorrelation of lag 2/unweighted, hydrophilic factor, 2st component symmetry directional WHIM index/weighted by atomic van der Waals volumes, and R maximal index/weighted by atomic polarizabilities.

3. The method of claim 2, wherein said method comprises comparing all of said physiochemical properties.

4. The method of claim 1, wherein said amino acid property descriptors are selected from the group consisting of volume, composition and polarity.

5. The method of claim 4, wherein said amino acid property descriptors are compared at specific positions in an alignment of known odorant receptor sequences.

6. The method of claim 1, wherein said method is performed in silico.

7. The method of claim 1, further comprising the step of displaying the results of said comparing on a computer screen.

8. The method of claim 1, further comprising the step of screening odorants identified in said method using an vitro assay.

9. A system for identifying an odorant ligand for an odorant receptor, comprising:
a computer program and computer software configured for comparing three or more amino acid property descriptors of an odorant receptor with three or more physicochemical properties of a plurality of odorants; and identifying one or more odorant receptor for said odorant receptor based on said comparing.

10. The system of claim 9, wherein said physicochemical properties are selected from the group consisting of Harary H index, topological polar surface area using N, O polar contributions, leverage-weighted autocorrelation of lag 0/weighted by atomic polarizabilities, R autocorrelation of lag 6/weighted by atomic polarizabilities, topological polar surface area using N, O, S, P polar contributions, Radial Distribution Function—11.0/weighted by atomic masses, valence connectivity index chi-2, phenol/enol/carboxyl OH, R autocorrelation of lag 2/weighted by atomic Sanderson electronegativities, R maximal autocorrelation of lag 4/weighted by atomic masses, graph vertex complexity index, Geary autocorrelation—lag 1/weighted by atomic masses, Ha attached to C3(sp3)/C2(sp2)/C3(sp2)/C3(sp), molecular path count of order 04, leverage-weighted autocorrelation of lag 2/unweighted, hydrophilic factor, 2st component symmetry directional WHIM index/weighted by atomic van der Waals volumes, and R maximal index/weighted by atomic polarizabilities.

11. The system of claim 10, wherein said system comprises comparing all of said physiochemical properties.

12. The system of claim 9, wherein said amino acid property descriptors are selected from the group consisting of volume, composition and polarity.

13. The system of claim 12, wherein said amino acid property descriptors are compared at specific positions in an alignment of known odorant receptor sequences.

14. The system of claim 9, wherein said computer program and computer processor are further configured for displaying the results of said comparing on a computer screen.

15. The system of claim 9, wherein said system is accessed by users within a web-based platform via a web browser across the Internet.

16. The system of claim 9, wherein said system is provided as a software package and used as a stand-alone system on a single computer.

17. A method of identifying an odorant receptor for an odorant, comprising:
a) comparing three or more amino acid property descriptors of a plurality of odorant receptors with three or more physicochemical properties of an odorant; and
b) identifying one or more odorants receptors for said odorant based on said comparing.

18. A system for identifying an odorant receptor for an odorant, comprising:
a computer program and computer software configured for three or more amino acid property descriptors of a plurality of odorant receptors with three or more physicochemical properties of an odorant; and identifying one or more odorants receptors for said odorant based on said comparing.

The application's sequence listing, which the Patent Office published only in electronic form, follows.

SEQUENCE LISTING (1889 sequences)

SEQ ID NO: 1 - protein, 318 aa, Artificial Sequence
  Synthetic
YSRTMHQGNQTAISGFILLGLTVGSEQQLLLFTLFLCMYLVTMVGNSLIILAIISDTHLYSPMYFFLANLSFTDICFTTTTVPKILADIQSQNPTISFVGCFTQMYFFMFLVDLDNFLLAAMAYDRYIAICHPLHYAALLNPKRCALLVVVPWVISNLVSVLHLSLLSRLPFCDQRVIPHFFCDLEPVLRLACSDTQINNLLILIVGGTVIFVPFVFILVSYALIGTAVLNVPSVKGKWKTFSTCGSHLSAVSLFYGSIVGVYFLPASSYSAERDKVAAIMYTVVTPMMNPFIYSLRNKDMKRALRRLLSQKSLICSW

SEQ ID NO: 2 - protein, 318 aa, Artificial Sequence; identical to SEQ ID NO: 1
  Synthetic

SEQ ID NO: 3 - protein, 318 aa, Artificial Sequence; identical to SEQ ID NO: 1
  Synthetic

SEQ ID NO: 4 - protein, 312 aa, Artificial Sequence
  Synthetic
MHQGNQTTITEFILLGFFKQDEHQNLLFVLFLGMYLVTVIGNGLIIVAISLDTYLHTPMYLFLANLSFADISSISNSVPKMLVNIQTKSQSISYESCITQMYFSIVFVVIDNLLLGTMAYDHFVAICHPLNYTILMRPRFGILLTVISWFLSNIIALTHTLLLIQLLFCNHNTLPHFFCDLAPLLKLSCSDTLINELVLFIVGLSVIIFPFTLSFFSYVCIIRAVLRVSSTQGKWKAFSTCGSHLTVVLLFYGTIVGVYFFPSSTHPEDTDKIGAVLFTVVTPMINPFIYSLRNKDMKGALRKLINRKISSL

SEQ ID NO: 5 - protein, 316 aa, Artificial Sequence
  Synthetic
IGRNMHQGNQTTITEFILLGFFKQDEHQNLLFVLFLGMYLVTVIGNGLIIVAISLDTYLHTPMYLFLANLSFADISSISNSVPKMLVNIQTKSQSISYESCITQMYFSIVFVVIDNLLLGTMAYDHFVAICHPLNYTILMRPRFGILLTVISWFLSNIIALTHTLLLIQLLFCNHNTLPHFFCDLAPLLKLSCSDTLINELVLFIVGLSVIIFPFTLSFFSYVCIIRAVLRVSSTQGKWKAFSTCGSHLTVVLLFYGTIVGVYFFPSSTHPEDTDKIGAVLFTVVTPMINPFIYSLRNKDMKGALRKLINRKISSL

SEQ ID NO: 6 - protein, 312 aa, Artificial Sequence
  Synthetic
MHQENQTTITEFILLGLSNQAEHQNLLFVLFLSMYVVTVVGNGLIIVAISLDIYLHTPMYLFLAYLSFADISSISNSVPKMLVNIQTNSQSISYESCITQMYFSIVFVVTDNLLLGTMAFDHFVAICHPLNYTTFMRARFGTLLTVISWFLSNIIALTHTLLLIQLLFCDHNTLPHFFCDLAPLLKLSCSDTMINELVLFIVGLSVIIFPFVLIFFSYVCIIRAVLGVSSTQGKWKAFSTCGSHLTIALLFYGTTVGVYFFPSSTHPEDTDKIGAVLFTVVTPMMNPFIYSLRNKDMKGALRKLINRKISSL

SEQ ID NO: 7 - protein, 316 aa, Artificial Sequence
  Synthetic
ISRNMHQENQTTITEFILLGLSNQAEHQNLLFVLFLSMYVVTVVGNGLITVAISLDIYLHTPMYLFLAYLSFADISSISNSVPKMLVNIQTNSQSISYESCITQMYFSIVFVVTDNLLLGTMAFDHFVAICHPLNYTTFMRARFGTLLTVISWFLSNIIALTHTLLLIQLLFCDHNTLPHFFCDLAPLLKLSCSDTMINELVLFIVGLSVIIFPFVLIFFSYVCIIRAVLGVSSTQGKWKAFSTCGSHLTIALLFYGTTVGVYFFPSSTHPEDTDKIGAVLFTVVTPMMNPFIYSLRNKDMKGALRKLINRKISSL

SEQ ID NO: 8 - protein, 317 aa, Artificial Sequence
  Synthetic
MNMDQGNQTSISEFILLGLSNQAEKQKLIFVIFLSMYLVTVIGNSLIILAIGLDIHLHTPMYLFLANLSFADISSSSTSVPKMLMNIQTNSQSISYEGCITQMYFSIVFVVIDNFLLGVMAYDRYVAICHPLNYTNIMHPRFCLLLSFCPWALSNIVALTHTLLANQLIFCNHNTIQHFFCDLAPLIKLSCSDAMINELVKFVVGLSVITFPFALILFSYVCIIRDVLRISSTEGKWKAFSTCGSHLTIVFLFYGTIVGVYFFPSSTHPEDTDKIGAVLFTVVTPMLNPFIYSLRNKDMKGALRKLINKSHLLPLMS

SEQ ID NO: 9 - protein, 317 aa, Artificial Sequence
  Synthetic
MNMDQENQTSISEFILLGLSNQAEKQKLIFVIFLSMYLVTVIGNSLIILAIGLDIHLHTPMYLFLANLSFADISSSSTSVPKMLMNIQTNSQSISYEGCITQMYFSIVFVVIDNFLLGVMAYDRYVAICHPLNYTNIMHPRFCLLLSFCPWALSNIVALTHTLLANQLIFCNHNTIQHFFCDLAPLIKLSCSDAMINELVKFVVGLSVITFPFALILFSYVCIIRDVLRISSTEGKWKAFSTCGSHLTIVFLFYGTIVGVYFFPSSTHPEDTDKIGAVLFTVVTPMLNPFIYSLRNKDMKGALRKLINKSHLLPLMS

SEQ ID NO: 10 - protein, 307 aa, Artificial Sequence
  Synthetic
MDGDNETMVAEFLLLGLSGKSEQEEVVFGMFLGMYLVTISGNLLIILAISCDPHLHTPMYFFLANLSSVDICFSSVTVPKALVNHVLGSKSISYTECMIQIYFFITFINMDGFLLSVMAYDRYVAICHPLHYTMMMRSRLCVLLVAISWVITNLHALLHTLLMVRLTFCSHNAVHHFFCDPYPILKLSCSDTFINDLMVFTVGGVIFLTPFSCIVVSYVYIFSKVLKIPSARGIRKALSTCGSHLTVVSLFYGAILGVYMRPSSSYSLQDTVATVIFTVVTPLVNPFIYSLRNQDMKGALRKIMLRS

SEQ ID NO: 11 - protein, 307 aa, Artificial Sequence; identical to SEQ ID NO: 10
  Synthetic

SEQ ID NO: 12 - protein, 307 aa, Artificial Sequence
  Synthetic
MDGDNQTIVTEFILLGLTRQSEKEEVVFGLFLWMYLVTISGNLLIILAISCDPHLHTPMYFFLANLSSVDISAPSVIVPKALVNHMLGSKSISYTGCMTQIYFFITFSNMDGFLLSVMAYDRYVAICHPLHYTMMMRPRLCVLLVAISWAITNLHALLHTLLMVRLTFCSHNAVHHFFCDPYPILKLSCSDTFINDLMVFTIGGLVFMTPFTCIIVSYAYIFSKVLKLKSAHGIRKALSTCGSHLTVVSLFYGAILGIYMHPSSTYTVQDTVATVIFTVVTPMVNPFIYSLRNRDIKGALRKIILRS

SEQ ID NO: 13 - protein, 315 aa, Artificial Sequence
  Synthetic
MVRENQSTAIEFLLLGIAGQSKEEEVIFGMFLWMYLVTVCGNLLIILAISCDPHLHTPMYFFLANLSSVDICFSSVTVPKALVNYMLGIKTISYTECMTQIYFFITFINMDGFLLSVMAYDRYVAICHPLHYTMMMRPRLCVLLVAISWAITNLHALLHTLLMVRLTFCSHNAMHHFFCDPYPILKLSCSDTFINDITAFTVGGLTSITPFTCITVSYGYILSNVLKFPSIQGIRKALSTCGSHLTVVSLFYGAILGVYMHPSSTYSVQDMVATAFFTVVTPMVNPFIYSLRNRDVKGALRKLMCRRLTSSRFYN

SEQ ID NO: 14 - protein, 312 aa, Artificial Sequence
  Synthetic
MSGTNQSSVSEFLLLGLSRQPQQQHLLFVFFLSMYLATVLGNLLIILSVSIDSCLHTPMYFFLSNLSFVDICFSFTTVPKMLANHILETQTISFCGCLTQMYFVFMFVDMDNFLLAVMAYDHFVAVCHPLHYTAKMTHQLCALLVAGLWVVANLNVLLHTLLMAPLSFCADNAITHFFCDVTPLLKLSCSDTHLNEVIILSEGALVMITPFLCILASYMHITCTVLKVPSTKGRWKAFSTCGSHLAVVLLFYSTIIAVYFNPLSSHSAEKDTMATVLYTVVTPMLNPFIYSLRNRYLKGALKKVVGRVVFSV

SEQ ID NO: 15 - protein, 312 aa, Artificial Sequence
  Synthetic
MGGTNQSSVSEFLLLGLSRQPQQQQLIFLLFLIMYLATVLGNLLIILAISTDSRLHTPMYFFLSNLSFVDVCFSSTTVPKVLAIHILRNQAISFSGCLTQLYFLCVFADMDNFLLAVMAYDRFVAICHPLHYTTKMTHQLCAFLVVGSWMVASLNALLHTLLVAQLYFCGDNVIPHFFCEVTPLLKLSCSDTHLNELMILAVAGLIMLAPFVCILLSYILIACAILKISSTGRWKAFSTCGSHLAVVCLFYGTIISLYFNPSSSHSAGRDMAAAMMYTVVTPMMKPFIYSLRNRDMKGALRKVLTMRFISTQ

SEQ ID NO: 16 - protein, 312 aa, Artificial Sequence; identical to SEQ ID NO: 15
  Synthetic

SEQ ID NO: 17 - protein, 313 aa, Artificial Sequence
  Synthetic
MEGANLSGVSEFLLLGLSQDPRQQQLLFSAFLSMYLLTGLGNLLIILAIAADPRLHTPMYFFLANLAFVDVCFTSTTIPKMLANHVSGHKGISYSGCLTQMFFFIWFAGIDSFLLTAMAYDRFVAICHPLHYTTSITPRLCGFLVTASWASAFANALTHTVLLTRLLFCGHNQVPHFFCDLSPLLKLACLDTSLNDIMVYTVGALPIITPFVGILTSYTRIFTAVLRIPSTGGKWKAFSTCGSHLSVVSLFYGTLIGVYFSPTSSHTAQKDTAAAVMYTVVTPMMNPFIYTLRNKDMKGALMTFVRRTAVLVR

SEQ ID NO: 18 - protein, 313 aa, Artificial Sequence
  Synthetic
MEGANLSGVSEFLLLGLSQDPRQQQLLFSAFLSMYLLTGLGNLLIILAIAADPRLHTPMYFFLANLAFVDVCFTSTTIPKMLANHVSGHKGISYSGCLTQMFFFIWFAGIDSFLLTAMAYDRFVAICHPLHYTTSITPRLCGFLVTASWASAFANALTHTVLLTRLLFCGHNQVPHFFCDLSPLLKLACSDTSLNDIMVYTVGALPIITPFVGILTSYTRIFTAVLRIPSTGGKWKAFSTCGSHLSVVSLFYGTLIGVYFSPTSSHTAQKDTAAAVMYTVVTPMMNPFIYTLRNKDMKGALMTFVRRTAVLVR

SEQ ID NO: 19 - protein, 318 aa, Artificial Sequence
  Synthetic
MEGKNQTNISEFLLLGFSSWQQQQVLLFALFLCLYLTGLFGNLLILLAIGSDHCLHTPMYFFLANLSLVDLCLPSATVPKMLLNIQTQTQTISYPGCLAQMYFCMMFANMDNFLLTVMAYDRYVAICHPLHYSTIMALRLCASLVAAPWVIAILNPLLHTLMMAHLHFCSDNVIHHFFCDINSLLPLSCSDTSLNQLSVLATVGLIFVVPSVCILVSYILIVSAVMKVPSAQGKLKAFSTCGSHLALVILFYGAITGVYMSPLSNHSTEKDSAASVIFMVVAPVLNPFIYSLRNNELKGTLKKTLSRPGAVAHACNPS

SEQ ID NO: 20 - protein, 313 aa, Artificial Sequence
  Synthetic
MEKENQTSLSEFLLLGFSSWPGHQGLLFALFLCLYLTGLFGNLLILLAIGSNNHLHTPMYFFLANLSLVDLCLPSATVPKMLLNIQTKSQSISYPGCLAQMYFCMMFANMDNFLLTVMAYDRFVAICHPLHYTTIMTPCLCTSLVAFSWVIATFNPLLHTLMMARLHFCSENIIHHFFCDINSLLPLSCSDTSLNQLMVLSVVGLIFVVPSVCILASYGRIVSAVMKITSMEGKLKAFSTCGSHLALVILFYGAIAGIYMSPSSNHSTEKDSAASVIFMVVAPVLNPFIYSLRNNELKGTLKKTLGQSKICSK

SEQ ID NO: 21 - protein, 313 aa, Artificial Sequence
  Synthetic
MEPRNQTSASQFILLGLSEKPEQETLLFSLFFCMYLVMVVGNLLIILAISIDSHLHTPMYFFLANLSLVDFCLATNTIPKMLVSLQTGSKAISYPCCLIQMYFFHFFGIVDSVIIAMMAYDRFVAICHPLHYAKIMSLRLCRLLVGALWAFSCFISLTHILLMARLVFCGSHEVPHYFCDLTPILRLSCTDTSVNRIFILIVAGMVIATPFVCILASYARILVAIMKVPSAGGRKKAFSTCSSHLSVVALFYGTTIGVYLCPSSVLTTVKEKASAVMYTAVTPMLNPFIYSLRNRDLKGALRKLVNRKITSSS

SEQ ID NO: 22 - protein, 314 aa, Artificial Sequence
  Synthetic
MEPRNQTSASQFILLGLSEKPEQETLLFSLFFCMYLVMVVGNLLIILAISIDSHLHTPMYFFLANLSLVDFCLATNTIPKMLVSLQTGSKAISYPCCLIQMYFFHFFGIVDSVIIAMMAYDRFVAICHPLHYAKIMSLRLCRLLVGALWAFSCFISLTHILLMARLVFCGSHEVPHYFCDLTPILRLSCTDTSVNRIFILIVAGMVIATPFVCILASYARILVAIMKVPSAGGRKKAFSTCSSHLSVVALFYGTTIGVYLCPSSVLTTVKEKASAVMYTAVTPMLNPFIYSLRNRDLKGALRKLVNRKITSSYL

SEQ ID NO: 23 - protein, 313 aa, Artificial Sequence
  Synthetic
MEPQNHTSASEFILLGLSEKPDHDPVLFSLFLCMYMITVVGNLLIILAISFDSHLHTPMYFFLANLSLVDFCLATNTVPKMLVNIQTRNKSISYPCCLTQMYFFHFFGIMDSVLIAVMAYDRFVAICHPLHYSTIMSPRLCGLLVGVPWVYSCFISLTHILLMARLVFCGKNELPHYFCDLTPLLRLSCTDTTVNKIFVLIVAGMVIATPFVCILASYARIIVAIMKVPSAGGRKKAFSTCSSHLSVVALFYGTTIGVYLCPSSVRTAVKEKASAVMYTAVTPMLNPFIYSLRNRDLKGALKKIINRKISTSS

SEQ ID NO: 24 - protein, 313 aa, Artificial Sequence; identical to SEQ ID NO: 23
  Synthetic

SEQ ID NO: 25 - protein, 317 aa, Artificial Sequence
  Synthetic
MGKISRVNQSVASDFLLLGLSEQPGEQPLLFGIFLGMYLVTMVGNLLIIFVISSDAHLHTPMYFFLANLSLTDACFTSASVPKMLANIYTQSQTISYSGCLTQLYFLLMFGGLDNCLLAVMAYDRYVAICQPLHYSTAMSPQLCALMLCTCWVLTNCPALMHTLLLTRVAFCAHTAIPHFYCDPSALLKLACSDTHINELMIITMGLVFLAVPLMLIVFSYVCISWAVLGIPSSGGRWKAFSTCGSHLTVVLLFYGSLMGVYLLPPSTHSTERESRAAVLYMIVIPMLNPFIYSLRNRDMKEAMGKLFGGGKTVFLL

SEQ ID NO: 26 - protein, 317 aa, Artificial Sequence
  Synthetic
GMGKPGRVNQTTVSDFLLLGLSERPEEQPLLFGIFLGMYLVTMVGNLLIILAISSDPHLHTPMYFFLANLSLTDACFTSASIPKMLANIHTQSQIISYSGCLAQLYFLLMFGGLDNCLLAVMAYDRYVAICQPLHYSTSMSPQLCALMLGVCWVLTNCPALMHTLLLTRVAFCAQKAIPHFYCDPSALLKLACSDTHVNELMIITMGLLFLTVPLLLIVFSYVRIFWAVFGISSPGGRWKAFSTCGSHLTVVLLFYGSLMGVYLLPPSTYSTERESRAAVLYMVIIPMLNPFIYSLRNRDMKEALGKLFVSGKTFFL

SEQ ID NO: 27 - protein, 316 aa, Artificial Sequence
  Synthetic
MGKPGRVNQTTVSDFLLLGLSEWPEEQPLLFGIFLGMYLVTMVGNLLIILAISSDPHLHTPMYFFLANLSLTDACFTSASIPKMLANIHTQSQIISYSGCLAQLYFLLMFGGLDNCLLAVMAYDRYVAICQPLHYSTSMSPQLCALMLGVCWVLTNCPALMHTLLLTRVAFCAQKAIPHFYCDPSALLKLACSDTHVNELMIITMGLLFLTVPLLLIVFSYVRIFWAVFVISSPGGRWKAFSTCGSHLTVVLLFYGSLMGVYLLPPSTYSTERESRAAVLYMVIIPTLNPFIYSLRNRDMKEALGKLFVSGKTFFL

SEQ ID NO: 28 - protein, 308 aa, Artificial Sequence
  Synthetic
NESSVSEFFLQGISGFSEQQQLLYGLFLCMYLVTLTGNVLIILAIGSDPHLHTPMYFFLANLSFADMGLISSTVTKMLFNVQTRCHTISYTGCLTQMYFFLMFGDLDSFLLAVMAYDRYVAICHPLHYSTIMSARVCALMLALCWVLTNIVALTHTLLMARLSFCVVGEIAHFFCDITPVLKLSCSDTHVNELMVFALGGTVLMVPFVCIVISYIHIVFAILKVRTPGGGTKAFSTCSSHLCVVCVFYGTLFSAYLCPPSVVSTEKDVAAAAMYTVVTPMLNPFIYSLRNKDMKGALKRLLCHRKFLS

SEQ ID NO: 29 - protein, 309 aa, Artificial Sequence
  Synthetic
NQSSVSEFFLRGISGFPEQQQLLYGLFLCMYLVTLTGNVLIILAISCDPHLHTPMYFFLANLSFADMGLISSAVTKMLFNVQTQRHTISYTGCLTQMYLFMMFGDLDSFFLAVMAYDRYVAICHPLHYSTIMSARVCALMLALCWVLTNIVALTHTLLMTRLSFCVVGEIAHFFCDITSVMKLSCSDTHVNELVLSGFGGTVLMVPFVSIVISYVRIVFAVLRVQTSGGSSKAFSTCSSHLCVVCVFYGTLFSVYLFPSSGETTEKDVVAAAMYTVVTPMLNPFIYSLRNKDMKGALKRLLCHRRKFSP

SEQ ID NO: 30 - protein, 311 aa, Artificial Sequence
  Synthetic
MENQSSISEFFLRGISAPPEQQQSLFGIFLCMYLVTLTGNLLIILAIGSDLHLHTPMYFFLANLSFVDMGLTSSTVTKMLVNIQTRHHTISYTGCLTQMYFFLMFGDLDSFFLAAMAYDRYVAICHPLCYSTVMRPQVCALMLALCWVLTNIVALTHTFLMARLSFCVTGEIAHFFCDITPVLKLSCSDTHINEMMVFVLGGTVLIVPFLCIVTSYIHIVPAILRVRTRGGVGKAFSTCSSHLCVVCVFYGTLFSAYLCPPSIASEEKDIAAAAMYTIVTPMLNPFIYSLRNKDMKGALKRLFSHRSIVSS

SEQ ID NO: 31 - protein, 318 aa, Artificial Sequence
  Synthetic
MARGNQTSTFEFLLWGLSEQPQQQHILFLIFLGMYLVTVAGNLLIVLAISTDVRLHTPMYFFLASLSCDDILLVSTIVPKALVNIHTQSRTISYAGCLVQLYFFLTFGDMDIFLLATMAYDRFVAICHPLHYRMIMSFQRCSLLVTACWTLTNLVAMTHTFLIFRLSFCSQKVIPDFFCDLGPLMKIACSETRINELVLLFLGGAVILIPLLLILVSYIRIVSAIIRVPSAQGRRKAFSTCGSHISVVALFFGTVIRAYLCPSSSNSVVEDTAAVVMYTVVTPLLNPFIYSLRNKDMKGALVRILKGKVSFSWAQGLL

SEQ ID NO: 32 - protein, 319 aa, Artificial Sequence
  Synthetic
MARGNQTSTFEFLLWGLSEQPQQQHILFLIFLGMYLVTVAGNLLIVLAISTDVRLHTPMYFFLASLSCDDILLVSTIVPKALVNIHTQSRTISYAGCLVQLYFFLTFGDMDIFLLATMAYDRFVAICHPLHYRMIMSFQRCSLLVTACWTLTNLVAMTHTFLIFRLSFCSQKVIPDFFCDLGPLMKIACSETRINELVLLFLGGAVILIPLLLILVSYIRIVSAIIRVPSAQGRRKAFSTCGSHISVVALFFGTVIRAYLCPSSSNSVVEDTAAVVMYTVVTPLLNPFIYSLRNKDMKGALVRILKGKVSFSWAQGLLQ

SEQ ID NO: 33 - protein, 318 aa, Artificial Sequence
  Synthetic
MARGNQTSTFEFLLWGLSEKPQQQHILFLVFLWMYLVTVAGNLLIVLAISTDVRLHTPMYFFLATLSCVDILFTSTTVPKALVNIHTQSRTISYAGCLVQLYFFLTFGDMDIFLLATMAYDRFVAICHPLHYRMIMSFQRCSLLVTACWTLTTVVAMTHTFLIFRLSFCSQKVIPDFFCDLGPLMKIACSETRINELVLLFLGGAVILIPFLLILMSYIRIVSAILRVPSAQGRRKAFSTCGSHLSVVALFFGTVIRAYLCPSSSNSVVEDTAAAVMYTVVTPLLNPFIYSLRNKDMKGALVRILKGKVSFSWAQGLL

SEQ ID NO: 34 - protein, 292 aa, Artificial Sequence
  Synthetic
MGRENQTSTFEFLLWGLSEQLQQQHILFLIFLWMYLVTVVGNLLIVLAISTDVRLHTPMYFLLANLSCDDILFTSTTIPKALVNIHTQSRTISYAGCLVQLYFFLTFGDMDIFLLATMAYDRFVAICHPLHYRMIMSFQRCSFLVTACWILTTFVAMTHTLLIFRLSFCSKKVIPDFFCDLGPLMKIACSETRINELVLLFLGGAVILIPFLLILVSYIRIVSAILRLPSAQGRRKAFSTCGSHLSVVALCFGTVIKAYLCPSSSNSVVEDTAAVVMYTVVTPLLNPFIYSL

SEQ ID NO: 35 - protein, 318 aa, Artificial Sequence
  Synthetic
MEPEKQTEISEFFLQGLSEKPEHQTLLFTMFLSTYLVTIIGNALIILAIITDSHLHTPMYFFLFNLSLVDTLLSSTTVPKMLANIQAQSRAIPFVGCLTQMYAFHLFGTMDSFLLAVMAIDRFVAIVHPQRYLVLMCSPVCGLLLGASWMITNLQSLIHTCLMAQLTFCAGSEISHFFCDLMPLLKLSGSDTHTNELVIFAFGIVVGTSPFSCILLSYIRIFWTVFKIPSTRGKWKAFSTCGLHLTVVSLSYGTIFAVYLQPTSPSSSQKDKAAALMCGVFIPMLNPFIYSIRNKDMKAALGKLIGKVAVPCPRPEQL

SEQ ID NO: 36 - protein, 313 aa, Artificial Sequence
  Synthetic
MAPENQTTVLEFHLMGLSEDPDLQTILFGLFLSMYLVTVFGNLLIILAIISDSHLHTPMYFFLCNLSLVDIFFCSTTVPKMLVNIQTQSRAISFTGCLVQMYAFHLFGTIDSFLLAVMAIDRLVAIAYPLRYSVLMSPHVCALLVGGTWVITNLQSLVHTCLMAQLTFCARSEIPHFFCDLMPLLKLSCSDTHINELVIFAFGIVMGLSPLSCILVSYICIFRAVFRIPSAQGKWKAFSTCGSHLTVVSLFYGTIFTGYLLPASPSSSQKDKAAALMFGVVIPTLNPFIYSLRNKDMKAALRKLGSKAVSFQS

SEQ ID NO: 37 - protein, 313 aa, Artificial Sequence
  Synthetic
MEGKNLTSISECFLLGFSEQLEEQKPLFGSFLFMYLVTVAGNLLIILVIITDTQLHTPMYFFLANLSLADACFVSTTVPKMLANIQIQSQAISYSGCLLQLYFFMLFVMLEAFLLAVMAYDCYVAICHPLHYILIMSPGLCIFLVSASWIMNALHSLLHTLLMNSLSFCANHEIPHFFCDINPLLSLSCTDPFTNELVIFITGGLTGLICVLCLIISYTNVFSTILKIPSAQGKRKAFSTCSSHLSVVSLFFGTSFCVDFSSPSTHSAQKDTVASVMYTVVTPMLNPFIYSLRNQEIKSSLRKLIWVRKIHSP

SEQ ID NO: 38 - protein, 312 aa, Artificial Sequence
  Synthetic
MMGQNQTSISDFLLLGLPIQPEQQNLCYALFLAMYLTTLLGNLLIIVLIRLDSHLHTPMYLFLSNLSFSDLCFSSVTIPKLLQNMQNQDPSIPYADCLTQMYFFLLFGDLESFLLVAMAYDRYVAICFPLHYTAIMSPMLCLALVALSWVLTTFHAMLHTLLMARLCFCADNVIPHFFCDMSALLKLAFSDTRVNEWVIFIMGGLILVIPFLLILGSYARIVSSILKVPSSKGICKAFSTCGSHLSVVSLFYGTVIGLYLCSSANSSTLKDTVMAMMYTVVTPMLNPFIYSLRNRDMKGALSRVIHQKKTFF

SEQ ID NO: 39 - protein, 313 aa, Artificial Sequence
  Synthetic
MGQNQTSISDFLLLGLPIQPEQQNLCYALFLAMYLTTLLGNLLIIVLIRLDSHLHTPMYLFLSNLSFSDLCFSSVTIPKLLQNMQNQDPSIPYADCLTQMYFFLLFGDLESFLLVAMAYDRYVAICFPLHYTAIMSPMLCLALVALSWVLTTFHAMLHTLLMARLCFCADNVIPHFFCDMSALLKLAFSDTRVNEWVIFIMGGLILVIPFLLILGSYARIVSSILKVPSSKGICKAFSTCGSHLSVVSLFYGTVIGLYLCSSANSSTLKDTVMAMMYTVVTPMLNPFIYSLRNRDMKGALSRVIHQKKTFFSL

SEQ ID NO: 40 - protein, 314 aa, Artificial Sequence
  Synthetic
MMGQNQTSISDFLLLGLPIQPEQQNLCYALFLAMYLTTLLGNLLIIVLIRLDSHLHTPMYLFLSNLSFSDLCFSSVTIPKLLQNMQNQDPSIPYADCLTQMYFFLLFGDLESFLLVAMAYDRYVAICFPLHYTAIMSPMLCLALVALSWVLTTFHAMLHTLLMARLCFCADNVIPHFFCDMSALLKLAFSDTRVNEWVIFIMGGLILVIPFLLILGSYARIVSSILKVPSSKGICKAFSTCGSHLSVVSLFYGTVIGLYLCSSANSSTLKDTVMAMMYTVVTPMLNPFIYSLRNRDMKGALSRVIHQKKTFFSL

SEQ ID NO: 41 - protein, 314 aa, Artificial Sequence
  Synthetic
MMGQNQTSISDFLLLGLPIQPEQQNLCYALFLAMYLTTLLGNLLIIVLIRLDSHLHTPVYLFLSNLSFSDLCFSSVTMPKLLQNMQNQDPSIPYADCLTQMYFFLYFSDLESFLLVAMAYDRYVAICFPLHYTAIMSPMLCLSVVALSWVLTTFHAMLHTLLMARLCFCADNVIPHFFCDMSALLKLACSDTRVNEWVIFIMGGLILVIPFLLILGSYARIVSSILKVPSSKGICKAFSTCGSHLSVVSLFYGTVIGLYLCPSANSSTLKDTVMAMMYTVVTPMLTPFIYSLRNRDMKGALERVICKRKNPFLL

SEQ ID NO: 42 - protein, 314 aa, Artificial Sequence
  Synthetic
MAEGNQTVIFQFLLLGLPIPTEHQQLYYALFLLMYLTTVLGNLIIIILIRLDSHLHTPMYLFLSNLSFSDLCFSSVTMPKLLQNMQSQDSSITYAGCLTQMYFFLLFGDLESFLLVAMAYDRYVAICFPLHYMSIMSPSLCVSLVLLSWVLTTFHAMLHTLLMARLSFCEDNVIPHFFCDMSALLKLSCSDTHVNELVIFVTGGLILVIPFVLILVSYAQIVSSILKVPSARGIRKAFSTCGSHLSVVSLFYGTIIGLYLCPSADNSTVKETVMAMMYTVVTPMLNPFIYSLRNRDMKGALARVICKKKVFFCL

SEQ ID NO: 43 - protein, 317 aa, Artificial Sequence
  Synthetic
MQGTTERNQTAISQFLLLGLPIPTEHQHLFYALFLAMYLTTVLGNLIIIILIHLDSHLHTPMYSFLSNLSFSDLCFSSVTMPKLLQNMQSQDPSIPYAGCLAQMYFFLFFADLESFLLVAMAYDRYVAICFPLHYMSIMSPRLCVSLVLLSWVLTTFHAMLHTLLMARLSFCEDNVIPHFFCDMSALLKLSCSDTYVNELVIFVMGSLILVIPFVLILVSYARIVSSILKVPSARGIRKAFSTCGSHLSVVSLFYGTVIGLYLCPSADNSTVKETVMAMMYTVVTPMLNPFIYSLRNRDMKGALISVLCKKKILFCL

SEQ ID NO: 44 - protein, 314 aa, Artificial Sequence
  Synthetic
MTRRNQTVISQFLLLGLPIPPEHQQLYYALLLSMYLTTVLGNLIIIILILLDSHLHTPMYLFLSNLSFADLCFSSVTMPKLLQNMQSKVPSIPYAGCLAQIYFFLYFGDLGNFLLVAMAYDRYVAICFPLHYMSIMSPRLCVSLVLLSWVLTTFHAMLHTLLMARLSFCEDNVIPHYFCDMSTLLKVACSDTHDNELAIFILGGPIVVLPFLLIIVSYARIVSSIFKFPSFQGIRKAFSTCGSHLSVVSLFYGTVIGLYLCPSANNTYVKETIMSLMYTMVTPMLNPFIYSLSNRDIKDALEKIMCKRQIPFFL

SEQ ID NO: 45 - protein, 314 aa, Artificial Sequence
  Synthetic
MTERNKTVISQFLLLGLPIPPEHQQLFYALFLVMYLTTVLGNLIIIILIILDSHLHTPMYLFLSNLSFSDLCFSSVTMPKLLQNMQSQVPSIPYAGCLAQIYFFLFFGDLGNFLLVAMAYDRYVAICYPLHYTTIMSPRLCVSLVVLSWVLTTFHAMLHTLLMARLSFCEDNVIPHYFCDMSALLKLACSDTRVNEVVIFIVASIFLVLPFALITMSYVRIVSSILKVPSSQGIYKAFSTCGSHLSVVSLFYGTVIGLYLSPSSNNSTVKDTVMSLMYTVVTPMLNPFIYSLRNRDIKGALERVFCKRKIQLNL

SEQ ID NO: 46 - protein, 319 aa, Artificial Sequence
  Synthetic
MPGKNQTVISRFILLGLPIPPEHQHLFYALFLAMYLTTVLGNLVIIVLIHLDSHLHTPMYLFLSNLSFTDLCFSTVTMPNFLQNMQSQVSSIPYAGCLAQMYFFLFFGDVESLLLVAMAYDRYVAICFPLHYTRIMSPNLCVSMVLLSWALTTLCAMLHTLLLTRLSFCKNNVIPHFFCDLSALLKLACSDIHINELMIMIIGALVVILPFLLIIVSYAHIVSSILKVPSTRGIHKVFSTCGSHLSVVSLFYGSVIVLYLCPSSNNSTVKDTVMSMMYTVVTPMLNPFIYSLRNRDMKEALKRVLQKKIKLSSNYGNYI

SEQ ID NO: 47 - protein, 311 aa, Artificial Sequence
  Synthetic
MPGNNQTIISQFLLLGLPIAPEYEHLFYALFLAMYLTTVLGNLIIIILIILDSHLHTPMYLFLSNLSFSDLCFSSVTMPKLLQNMQSQDTSIPYAGCLTQVYFFLFFAALENFLLVAMAYDRYVAICFPLHYASIMSPKLCVSLVLLIWVLTTLYAMLHTLLLTRLSFCENNVIPHFFCDLSALLKLACSDIHINELVILIIGGLVVLLPFLLIIVSYARIISSILKVPSTRGIHKLFSTCGSHLSVVSLFYGTIIGIYLGPSANNSTLKDIVMSMMYTVVTPMLNPFIYSLRNRDIKGALKKVFQKKSLL

SEQ ID NO: 48 - protein, 315 aa, Artificial Sequence
  Synthetic
MERGNQTVVSEFLLLGLPIEPHQQDLFYALFLSMYLTTALGNLIIIILIHLDSHLHTPMYLFLSNLSFSDFCFSSVTIPKLLQNMQSQVPSIPYAGCLAQMYFFLLFADLESFLLVAMAYDRYVAICFPLHYTSIMSPKLCLCLVALSWLLTTVISLSHTLLMARLSFCANNVIPHFFCDMSALLKLACSDIQINKLMIFILGGLVIIVPFLLIFSSYARIVSSILKVPSSRSIRKAFSTCGSHLSVVSLFYGTIIGLYLCPSANNSTIKETVMAVMYTVVTPMLNPFIYSFRNQDIKGAFKKVFSKQMANFSLR

SEQ ID NO: 49 - protein, 312 aa, Artificial Sequence
  Synthetic
MTGNNQTFILEFLLLGLPIPSEYQLLFNALFLAMYLTTLLGNLLIILLVRLDSHLHMPMYLFLSNLSFSDLCFSSVTIPKLLQNMHSQVPTISYAGCLTQLYFFMVFGDMESFLLVAMAYDRYVAICFPLHYTSIMSTKLCVSLVLLLWMLTIFHALLHTLLTARLSFCEKNVILHFFCDLPALLKLSCSDTFVNELMIFILGGIIIIIPFLLIGMSYVRIFFSILKVPSTQGIHKVFSTCGSHLSVVSLFYGTIIGLYLCPSSNNSTLKKTAMALMYTLVTPMLNPFIYSLRNRDIKRALIRVISSKKISL

SEQ ID NO: 50 - protein, 312 aa, Artificial Sequence
  Synthetic
MAGKNQTLILEFLLLGLPISSEYHLLFYALLLAMYLTTLLGNLLIILLVRLDSHLHTPMYLFLSNLSFSDLCFSSVTIPKLLQNMQSQVPTISYADCLTQLYFFMVFGDMESFLLVVMAYDRYVAICFPLHYTSIMSTKFCALLVLLLWMLTISHALLHTLLMARLSFCEKNVILHFFCDISALLKLSCSDTYVNELMIFIMGGIISIIPFLLIVMSYVRIFFSILKVPSSQDIHKVFSTCGSHLSVVTLFYGTIIGLYLCPSGNNSTVNEISMAMMYTVVTPMLNPFIYRLRNRDMKRALIRVIFSKKISL

SEQ ID NO: 51 - protein, 312 aa, Artificial Sequence
  Synthetic
MTGNNQTLISKFLLLGLPILSEYHFLFYALFLAMYLTTILGNLLIIALVRLDSHLHTPMYLFLSNLSFSDLCFSSVTIPKLLQNMQSQVPSISYVGCLTQLYFFMVFGDMESFLLVVMAYDRYVAICFPLHYTSIMSTKFCTSLVLLLWMLTTSNALMHTLLMARLSFCEKNVILRFFCDISALLKLSCSDTFVNELMIFIMGGIIIIIPFLLIVMSYVRIFFSILKVPSTQGIHKVFSTCGSHLSVVSLFYGTIIGLYLCPSSNNSTVKESAMAMMYTVVTPMLNPFIYSLRNRDMKRALIRVICSKKISL

SEQ ID NO: 52 - protein, 312 aa, Artificial Sequence
  Synthetic
MKMNNKTVITQFLLLGLPISLEYKHLFYALFLAMYLTTVLGNLLIIVLIKLDSHLHTPMYLFLSNLSFSDLCFSSVTMPKMLHNMQSQDPSIPYGGCLAQIYFLMAFGDMESFLLVVMAYDRYVAICFPLHYTSIMSPKLCTCLMLLLWILTTSHAMMHTLLAARLSFCENNVILNFFCDLFAVLKLSCSDTYINDLMILIFGGLIFIIPFLLIVISYARIISSILKVPSTQGIYKVFSTCGSHLSVVSLFYGTIIGLYLCPSGNNSTVKEIAMAMMYTVVTPMLNPFIYSLRNRDMKKALIRVICSKKISL

SEQ ID NO: 53 - protein, 310 aa, Artificial Sequence
  Synthetic
MNNKTVITQFLLLGLPIPPEYQHLFYALFLAMYLTTILGNLLIIVLIQLDSHLHTPMYLFLSNLSFSDLCFSSVTMPKLLQNMQSQDPSIPYGGCLAQIFFFMLFGDMESFLLVAMAYDRYVAICFPLHYTSIMSPKVCTFLVLLLWILTTSHATMQILLTVRLSFCENNVLLNFFCDIFVLLKLACSDTYVNDLMILIMGGLIIVIPFLLIVISYARIISSTLKVPSTQGIHKVFSTCGSHLSVVSLFYGTIIGLYLCPSGNNFSLKGSAMAMMYTVVTPMLNPFIYSLRNRDMKRALIRIIGSKKISL

SEQ ID NO: 54 - protein, 312 aa, Artificial Sequence
  Synthetic
MIMKNQTVITQFLLLGLPILPEHQHLFYALFLAMYLTTALGNLLIIVLVQLDSHLHTPMYLFLSNLSFSDLCFSSVTMPKLLQNIQSQDPSIPYAGCLAQTYFFMVFGDMESFLLVAMAYDRYVAICFPLHYTSIMSPKLCGCLMLLLWMLTTSHAMMHTLLAARLSFCENNVILNFFCDLFVLLKLACSDTYVNELMIFIMSSLLIVIPFFLIVMSYARIIASILKVPSIQGIYKVFSTCGSHLSVVTLFYGTIIGLYLCPSGNNSTVKGTVMAMMYTVVTPMLNPFIYSLRNRDMKRALIRVICSKKISL

SEQ ID NO: 55 - protein, 311 aa, Artificial Sequence
  Synthetic
MIKNNQTLFNQFLLLGLPIPAEHQQLFFALFLSMYLTTILGNLIIIILIRLDSHLHTPMYLFLSNLSFSDLCFSSVTMPKLLQNMQSQDTSITYAGCLTQMYFFVLFGGLEIFLLVVMAYDRYVAICLPLHYTSIMSLKLCVCLVLLSWVISILNSMLHTLLLARLSFCEDNMIRHFFCDMSALLKLACSDIYINELMIFILGGPLMVIPFLLIVMSYVQIIFSILKASSTRAIYKVFSTCGSHLTVVSLFYGTIIGLYLCPSANNFTAKEASIAIMYTVVTPMLNPFIYSLRNRDIKEALINVLIKKIPL

SEQ ID NO: 56 - protein, 311 aa, Artificial Sequence; identical to SEQ ID NO: 55
  Synthetic

SEQ ID NO: 57 - protein, 311 aa, Artificial Sequence
  Synthetic
MIMNNKTVITQFILLGLPILPEYQHLFYALFLSMYLTTILGNLIIIILIQLDSHLHTPMYLFLSNLSFSDLCFSSVTMPKLLLNMQSQDTSIPYAGCLTQMYFSNLFGSLEIFLLVIMAYDRYAAICLPLHYTSIMSPKLCVCLVLLSWVISMLYSMLHTLLLARLSFCEDNVIPHFFCDISALLKLACSDIHINELMIFFLGGPLTVIPFLLIVVSYIQIVFSILKISSTRAIHKVFSTCGSHLSVVSLFYGTIIGLYLCPSANNFSVKKASITMMYTVVTPMLNPFIYSLRNRDIKEALVRVLIKKISL

SEQ ID NO: 58 - protein, 312 aa, Artificial Sequence
  Synthetic
MIINNQTAIPQFILLGLPILPEQQQMFYALFLAMYLTTVLGNLIIIILIRLDSHLHTPMYLFLSNLSFSDLCFSSVTMPKLLQNIQSQDPSISYAGCLTQMYFFMVFANTENVLLVVMAYDRYVAICFPLHYTSIMSPKLCVSLVVLTWVFTVLYSMLHTLLLARLSFCEDNVITHFFCDISALLKLACSDTYINELMIFILGTLDTVVPFLLIVVSYVQIVCSILKFSTKQGIAKVFSTCGSHLSVVSLFYGTIIGVYLCPSANNSTVKEIVMALMYTVVTPMLNPFIYSLRNRDIKEALIRVLCKKQIPL

SEQ ID NO: 59 - protein, 312 aa, Artificial Sequence
  Synthetic
MIMNNKTVISQFILLGLPIPQEYQHLYYALFLAMYLTTVLGNLIIIILIILDSHLHTPMYLFLSNLSFSDLCFSSVTMPKLLQNMQSQDTSISYAGCLTQMYFLLVFGDLESILLLVMAYDRYVAVCFPLHYMSIMSPTLCVCLLVLSWVFTVLYSMLHTLLLSRLSFCEDNLIHHFFCDISALLKLACSDIHINELMIFIMGGLVSIIPFLLIVVSYIQIVYSILKISSAHVLHKIFSTCGSHLSVVSLFYGTIFALYLCPSANNSTVKEISMAMMCTVVTPMLNPFIYSLRNRDMRDALFGVLGKKKISL

SEQ ID NO: 60 - protein, 312 aa, Artificial Sequence
  Synthetic
MIKNNQTVISQFLLLGLPIPPEHQHLFYALFLAMYLTTVLGNLIIIILIILDFHLHTPIYLFLSNLSFSDLCFSSVTMPKLLQNMQSQDTTISYVGCLTQMYFPNVFANLENFLLMFMAYDRYVAICYPLRYTSIMSPILCVCMVFMSWLLTMLNSTLHTVLIVKLSFCEDNVIPHFFCDISAVLKLACSDIYINELTIFITGAFIIVIPFLLIVVSYVQIVCSILKFSSTRGIAKIFSTCGSHLSVVSLFYGTIIGLYLCPSTNNSTVKDTAMAMMYTVVTPMLNPFIYSLRNKDMKEALIRVLCKKEISL

SEQ ID NO: 61 - protein, 312 aa, Artificial Sequence; identical to SEQ ID NO: 60
  Synthetic

SEQ ID NO: 62 - protein, 313 aa, Artificial Sequence
  Synthetic
MKRENQSSVSEFLLLDLPIWPEQQAVFFTLFLGMYLITVLGNLLIILLIRLDSHLHTPMFFFLSHLALTDISLSSVTVPKMLLSMQTQDQSILYAGCVTQMYFFIFFTDLDNFLLTSMAYDRYVAICHPLRYTTIMKEGLCNLLVTVSWILSCTNALSHTLLLAQLSFCADNTIPHFFCDLVALLKLSCSDISLNELVIFTVGQAVITLPLICILISYGHIGVTILKAPSTKGIFKALSTCGSHLSVVSLYYGTIIGLYFLPSSSASSDKDVIASVMYTVITPLLNPFIYSLRNRDIKGALERLFNRATVLSQ

SEQ ID NO: 63 - protein, 312 aa, Artificial Sequence
  Synthetic
MKRDNQSMVSEFILLGLPIRPEEQGMYYALFLTMYLTTVLGNLLIILLIRLDSHLHTPMYFFLSHLAFTDISFSSVTVPKMLRNMHIHDPSIPYAECIAQMYFFILFTDLDNFLLTSMAYDRYVAICHPLHYTTIMREELCILLVAISWILSCVSALSHTLLLARLSFCADNTISHFFCDLAALLKLSCSDISLNELVIFTVGTTVITLPLICILISYGHIVATILKVSSNKGICKALSTCGSHLSVVSLYYGTIIGVYFIPSSFTSTDKGIVASVMYTVVTPLLNPFIYSIRNRDMKEALKKLFNRASIST

SEQ ID NO: 64 - protein, 313 aa, Artificial Sequence
  Synthetic
MSPENQSSVSEFLLLGLPIRPEQQAVFFTLFLGMYLTTVLGNLLIMLLIQLDSHLHTPMYFFLSHLALTDISFSSVTVPKMLMDMRTKYKSILYEECISQMYFFIFFTDLDSFLITSMAYDRYVAICHPLHYTVIMREELCVFLVAVSWILSCASSLSHTLLLTRLSFCAANTIPHVFCDLAALLKLSCSDIFLNELVMFTVGVVVITLPFMCILVSYGYIGATILRVPSTKGIHKALSTCGSHLSVVSLYYGSIFGQYLFPTVSSSIDKDVIVALMYTVVTPMLNPFIYSLRNRDMKEALGKLFSRATFFSW

SEQ ID NO: 65 - protein, 319 aa, Artificial Sequence
  Synthetic
MSPENQSSVSEFLLLGLPIRPEQQAVFFALFLGMYLTTVLGNLLIMLLIQLDSHLHTPMYFFLSHLALTDISFSSVTVPKMLMNMQTQHLAVFYKGCISQTYFFIFFADLDSFLITSMAYDRYVAICHPLHYATIMTQSQCVMLVAGSWVIACACALLHTLLLAQLSFCADHIIPHYFCDLGALLKLSCSDTSLNQLAIFTAALTAIMLPFLCILVSYGHIGVTILQIPSTKGICKALSTCGSHLSVVTIYYRTIIGLYFLPPSSNTNDKNIIASVIYTAVTPMLNPFIYSLRNKDIKGALRKLLSRSGAVAHACNLNT

SEQ ID NO: 66 - protein, 313 aa, Artificial Sequence
  Synthetic
MRLKNHSSVSEFLLLGFPIRPEQGGIFFSLFLAMYLITVLGNLLIILLIRLDSHLHTPMYFFLSHLAFTDISFSSVTVPKMLTKVQNQPIPITYEECVSQTYFFIFFADLDSFLITSMAYDRYMAICHPLHYITIMSQSRCAMLVAVSWVIASACALLHSLLLDQLSFCADHTVPHFFCDLGALLKLSCSDTSLNQLVIFTAGLAAIMLPFLCILISYGRIGFTILQVPTTKGICKALSTCGSHLSVVALYYGSIIGLYFLPPSNSKINNNIVASVMYTVVTPMLNPFIYSLRNKDMKGALKKLLSKKTEFSK

SEQ ID NO: 67 - protein, 313 aa, Artificial Sequence
  Synthetic
MRRDNESTVSEFILLGLPIQPEDQGLYSALFLAMYLTTVLGNLLIILLIRLDSHLHTPMYFFLSHLAFTDVSFSSVTAPKMLMNMLTHSQSISYAGCVSQVYFFSTFTDLDSFLLTSMAYDRYVAICHPLHYTTIMSQNLCVLLVVMSWVLSSANALVHTLLLARLSHFRNNTIPHYFCEPSALLSLSSSDTTINEMVILPLGTLVITLPFICILVSYGRIGVTILRTPSIKGICKALSTCGSHLSVVCLYYGAIIGLYLVPSSNNTNDKDVIVAVIYSLVTPMVNPFIYSLRNRDIKGALRNILNRRLCPQW

SEQ ID NO: 68 - protein, 312 aa, Artificial Sequence
  Synthetic
MKRDNESTVSEFILLGLPIRAEDQGLYSALFLAMYLTTMLGNLLIILLIRLDSHLHTPMYFFLSHLAFTDISFSSVTAPKMLMNMLTHSQSISYAGCVSQMYFYIVFADLENFLLTSMAYDRYVAICHPLHYTTIMSQSLCLFLVVVSWALSSGNALVHTLLLAKLSHFRNNTVPHYFCDLSAMLKLSSSDTTINELLILTLGTMVTIPPFICILVSYVRIGVTILRTPSIKGICKALSTCGSHLCVVSLYYGAIIALYFVPSSNNTNDKDVIVALMYTVVTPMLNPFIYSLRNRDMKGALRNVLSRRLCSQ

SEQ ID NO: 69 - protein, 312 aa, Artificial Sequence
  Synthetic
MRRDNESTVSEFILLGLPIRAEDQGLYSALFLAMYLTTVLGNLLIILLIRLDSHLHTPMYFFLSHLAFTDISFSSVASPKMVINMLTHSQSISYAGCVSQVYFFSFFADLESFLLTSMAYDRYVAICHPLHYSQIMSENLCVLLIVVSWTLSTANSLVHTLLLVQLSYFRNNTIPHYFCDLSTLLKLSSSDTTINELVILVLGNMVITLPFICILVSYGHIGVTIMKIPSIKGICKALSTCGSHLCVVSLYYGAIIGLYFVPSSNNTSDKDAIVAMMYTMVIPMLNPFIYSLRNRDMKGALRNILSGRLWSQ

SEQ ID NO: 70 - protein, 312 aa, Artificial Sequence; identical to SEQ ID NO: 69
  Synthetic

SEQ ID NO: 71 - protein, 311 aa, Artificial Sequence
  Synthetic
MRRDNESTVSEFILLGLPIRAEEQGMYFALFLAMYLTTVLGNLLIILLIRLDSHLHIPMYFFLSHLAFTDISFSSVTAPKMLVNMLTHSQSISYTGCVSQVYFFAIFADLDSFLLTSMAYDRYVAICHPLHYSQTMSQTLCVLLVLVSWALSIANALVRTLLLAHLSHFRDNTIPHYFCDLSDWLKLSSSDTTINELVILVLGNVVITLPFICILVSYGHIGVTILKTPSIKGICKALSTCGSHLCVVSLYYGAIIGLYFVPSSNNTNDKDAIVAVMYTVVTPMLNPFIYSLRNRDMKGALRNILGRRLCS

SEQ ID NO: 72 - protein, 312 aa, Artificial Sequence
  Synthetic
MTEGNESIVSEFILLGLPIQPEDQDLYSALFLAMYLTTVLGNLLIILLIRLDSHLHTPMYFFLSHLAFTDISFSSVTAPKMLMNMLTHSQSISYAGCVFQVYFFLFFADLDNFLLTSMAYDRYVAICHPLHYTTMMSQNLCVLLVVVSWTLSTANALVHTLLLARLTHFRDNTISHYFCDLSTLLKLSSSDTTTNKLVILLLGNVIITLPFICILVSYGLIAVTILKIPSMKGICKALSTCGSHLCVVSLYYGAIIGLYFVPSSNNTNVQDAIVAVMYNVVTPMLNPFIYSLRNQDMKGALRNILSRRLCLQ

SEQ ID NO: 73 - protein, 309 aa, Artificial Sequence
  Synthetic
MRMDNESTVSEFILLGLPIRAKDQAVYSALILAMYLTTVLGNLLIILLIRLDPHLHTPMYFFLSHLALTDISFSSVTVPRMLVNMLTQSQSISYTGCISQVYFFIVFGSIDSFLLPSMAYDRYVAICHPLHYTLIMNLNLCVLLVVVSWALSLVNALVHTLLLARLSHFRNNIIPHYFCDLSALLKLSSSDTSINELVILVLGNVVITLPFICILVSYGYIGVTILKTPSTKGIRKALSTCGSHLCVVSLYYGSVIGLYCVPSSNNTNDKDAIVAMMYTVVTPMLNPFIYSLRNRDMKRALRNILSRKK

SEQ ID NO: 74 - protein, 309 aa, Artificial Sequence
  Synthetic
MRMDNDSALSEFILLGLPIRAEDQALYSVLILAMYLTTVLGNLLIILLIRLDSHLHTPMYFFLSHLAFTDISFSSVTAPKMLVNMLTHSKSIPYTGCVSQVYFFTVFASIDSFLLTSMAYDRYVAICHPLHYNIIMNLRLCVLLVVISWALSLTNALAHTLLLARLSHFRNNTIPHYFCDLSTLLKLSSSDTTINELVIFVLGNVVITLPFICILVSYGYIGVTILKTPSIKGIHKALSTCGSHLCVVSLYYGAIIGLYFVPSSNNTNDKDVIVAVMYTVVIPMLNPFIYSLRNRDMKRTLRNILSRTK

SEQ ID NO: 75 - protein, 309 aa, Artificial Sequence
  Synthetic
MRMDNKSTVSEFILLGLPIRPENQVIYSSLILTMYLTTVLGNLLIILLIRLDPHLHTPMYFFLSHLALTDISFSSVTVPKMLVNMLTHSQSISYDGCVSQVYFFIVFGSIDSFLLTSMAYDRYVAFCHPLHYTIIMNLSLCVLLVGMFWVLSSANALVQTLLLARLSHFRNNTIPYYFCDLSTLLKLSSSDTTINDLIILVLGNAVITLPFICILVSYGYIGVTILKTPSIKGIRKALSTCGSHLCVVSLYYGSIIGLYCVPSSNNTSEKNAIVAVMYTVVTPMLNPFIYSLRNQDMKGALRNILSRTQ

SEQ ID NO: 76 - protein, 306 aa, Artificial Sequence
  Synthetic
MDNESTVSEFILLGLPIRAEDQAVYSALFLVLYLTTVLGNLLIILLIRLDSHLHTPMYFFLSHLAFTDISFSSVTAPKMLVNMLTHSQSISYAGCISQEYFFTVFAGIDSFLLTSMAYDRYVAICHPLHYITIMNQNLCVLLVVVSWALSSANCLVHTLLLACLSHFRNNTIPHYFCDLSTLLKLSSSDTTINQLVILVLGNVVISLPFICILVSYGRIGVTIMKAPSIKGICKALSTCGSHLCVVSLYFGSIIGLYCVPSSNNINENNAIVSVMYTMVTPMLNPFIYSLRNRDIKRALKNILSRK

SEQ ID NO: 77 - protein, 306 aa, Artificial Sequence; identical to SEQ ID NO: 76
  Synthetic

SEQ ID NO: 78 - protein, 312 aa, Artificial Sequence
  Synthetic
MMKSNQSTVSEFILLGLPIQPEDQAVYFALFLAMYLTTVLGNLLIILLIRLDSHLHTPMYFFLSHLAFTDISFSSVTAPKMLMNMLTHSQSISHAGCVSQIYFFLLFGCIDNFLLTSMAYDRYVAICHPLHYTTIMSQSLCVLLVMVSWAFSSSNGLVHTLLFARLSLFRDNTVHHFFCDLSALLKLSSSDTTINELVILTLAVVVITVPFICILVSYGHIGATILRTPSIKGICKALSTCGSHLCVVSLYYGAIIGLYFFPSSNNTNDKDVIVAVLYTVVTPMLNPFIYSLRNRDINGALRKTLSRRLCSH

SEQ ID NO: 79 - protein, 313 aa, Artificial Sequence
  Synthetic
MKSTRNQSSASEFILLGLPIQPEEQGMYYALFLATYLTTVLGNLLIILLIRLDSHLHTPMYFFLSHLAFTDISFSSVTAPKMLMNMLIHSQSISYAGCISQVYFFLFFADLDSFLLTSMAYDRYVAICHPLHYTRIMSQSICILLVIESWFLSFAGALVHTILLARLSFFRGNTVHHFFCDLSALIKLSSSDTSINELVILVVGSLVITVPFVCILVSYGRIGATILKTPSIKGICKALSTCGSHLSVVSLYYGAIIGLYFVPSSNDTNDKDVIVAVMYTMVTPMLNPFIYSLRNRDMKGALRNMLARATSSM

SEQ ID NO: 80 - protein, 315 aa, Artificial Sequence
  Synthetic
MSCIIRNNHSITSEFILLGLPINPELNGMYSALFLAMYLTTVLGNLLIILLIRLDPHLHTPMYFFLSHLAFTDISFSSVTAPKMLVNMLTHSQSISYTGCISQVYFFLFFADLDSFLLTSMAYDRYVAICHPLHYTTIMSQSLCVLLLIVSWVLSFASAILHTLLLAHLSFSGGNTLPHFFCDLSALLKLSSSDTTINELVIFTVGVVIITVPLICILVSYGYIGATILRTPSIKGIYKALSTCGSHLSVVSLYYGAIIGLYSFPSPNNSNNKDVIVAVMYTMVTPMLNPFIYSLRNRDIKGALRNILGRKASSQ

SEQ ID NO: 81 - protein, 314 aa, Artificial Sequence
  Synthetic
MEKRNLTVVREFVLLGLPSSAEQQHLLSVLFLCMYLATTLGNMLIIATIGFDSHLHSPMYFFLSNLAFVDICFTSTTVPQMVVNILTGTKTISFAGCLTQLFFFVSFVNMDSLLLCVMAYDRYVAICHPLHYTARMNLCLCVQLVAGLWLVTYLHALLHTVLIAQLSFCASNIIHHFFCDLNPLLQLSCSDVSFNVMIIFAVGGLLALTPLVCILVSYGLIFSTVLKITSTQGKQRAVSTCSCHLSVVVLFYGTAIAVYFSPSSPHMPESDTLSTIMYSMVAPMLNPFIYTLRNRDMKRGLQKMLLKCTVFQQQ

SEQ ID NO: 82 - protein, 314 aa, Artificial Sequence; identical to SEQ ID NO: 81
  Synthetic

SEQ ID NO: 83 - protein, 310 aa, Artificial Sequence
  Synthetic
MGRNNLTRPSEFILLGLSSRPEDQKPLFAVFLPIYLITVIGNLLIILAIRSDTRLQTPMYFFLSILSFVDICYVTVIIPKMLVNFLSETKTISYSECLTQMYFFLAFGNTDSYLLAAMAIDRYVAICNPFHYITIMSHRCCVLLLVLSFCIPHFHSLLHILLTNQLIFCASNVIHHFFCDDQPVLKLSCSSHFVKEITVMTEGLAVIMTPFSCIIISYLRILITVLKIPSAAGKRKAFSTCGSHLTVVTLFYGSISYLYFQPLSNYTVKDQIATIIYTVLTPMLNPFIYSLRNKDMKQGLAKLMHRMKCQ

SEQ ID NO: 84 - protein, 318 aa, Artificial Sequence
  Synthetic
MGMSNLTRLSEFILLGLSSRSEDQRPLFALFLIIYLVTLMGNLLIILAIHSDPRLQNPMYFFLSILSFADICYTTVIVPKMLVNFLSEKKTISYAECLAQMYFFLVFGNIDSYLLAAMAINRCVAICNPFHYVTVMNRRCCVLLLAFPITFSYFHSLLHVLLVNRLTFCTSNVIHHFFCDVNPVLKLSCSSTFVNEIVAMTEGLASVMAPFVCIIISYLRILIAVLKIPSAAGKHKAFSTCSSHLTVVILFYGSISYVYLQPLSSYTVKDRIATINYTVLTSVLNPFIYSLRNKDMKRGLQKLINKIKSQMSRFSTKT

SEQ ID NO: 85 - protein, 318 aa, Artificial Sequence; identical to SEQ ID NO: 84
  Synthetic

SEQ ID NO: 86 - protein, 309 aa, Artificial Sequence
  Synthetic
MERINHTSSVSEFILLGLSSRPEDQKTLFVLFLIVYLVTITGNLLIILAIRFNPHLQTPMYFFLSFLSLTDICFTTSVVPKMLMNFLSEKKTISYAGCLTQMYFLYALGNSDSCLLAVMAFDRYVAVCDPFHYVTTMSHHHCVLLVAFSCSFPHLHSLLHTLLLNRLTFCDSNVIHHFLCDLSPVLKLSCSSIFVNEIVQMTEAPIVLVTRFLCIAFSYIRILTTVLKIPSTSGKRKAFSTCGFYLTVVTLFYGSIFCVYLQPPSTYAVKDHVATIVYTVLSSMLNPFIYSLRNKDLKQGLRKLMSKRS

SEQ ID NO: 87 - protein, 309 aa, Artificial Sequence; identical to SEQ ID NO: 86
  Synthetic

SEQ ID NO: 88 - protein, 310 aa, Artificial Sequence
  Synthetic
MEGVNQTRFVSEFILLGLSPRPEDQKPLFILFLTIYLVTLTGNLLIILAIRSDPHLHTPMYFFLSFLSLTDICFTTTIVPKMLVNFLSEKKTISYAGCLTQMYFLYALGNSDSCLLAVMAFDRYVAICNPFHYVTIMNHHRCALLVTFSCSFPHFHSLLHTLLLNLLTFCDSNVIHHFLCDLSPLLKLSCSSTFVNEIVIVTEGALVLVTPFLCIAFSYIRILVTVLKIPSAAGKRKAFSTCGSHFTVVTLFYGSIFYVYLQPVSTYTVKDHIATIVYTVLSSMLNPFIYSLRNKDLKQGLRKLISRRHI

SEQ ID NO: 89 - protein, 312 aa, Artificial Sequence
  Synthetic
MNNHSSSSSSTSDFILLGLSTNPWMQKPLFGIFIIMYLVTVMGNVLIILVIRSDSRLHTPMYFFLSNLSFMDICFTTVIVPKMLVNFLSETKTISYVGCLVQMYFFMALGNTDSYLLASMAIDRLVAICNPLHYDVVMRPQRCLLMLLGSCTISHLHALFRVLLMSRLSFCASHVIKHFFCDTQPVLKLSCSDTSSSQIVVMTETLAVIVTPFLCILFSYMRIIVTVLRIPSAAGKWKAFSTCGSHLTVVVLFYGSIIYVYFRPLSMYSVVKDRVATVMYTVVTPMMNPFIYSLRNKDMKRGLRKLMGKVHL

SEQ ID NO: 90 - protein, 306 aa, Artificial Sequence
  Synthetic
NSSSTSDFILLGLSTNPWMQKPLFGIFIIMYLVTVMGNVLIILVIRSDSRLHTPMYFFLSNLSFMDICFTTVIVPKMLVNFLSETKTISYVGCLVQMYFFIALANTDSYLLASMAIDRLVAICNPLHYDVVMRSQRCLLMLLGSCTISHLHALFRVLLMSRLSFCASHVIKHFFCDTQPVLKLSCSDTSSSQIVVMTETLAVIVTPFLCILFSYMKIIVTVLRIPSAAGKWKAFSTCGSHLTVVALFYGSVIYVYFRPLSMYSVVKDRIATVMYTVVTPMMNPFIYSLRNKDMKRGLRKLRDRLHS

SEQ ID NO: 91 - protein, 311 aa, Artificial Sequence
  Synthetic
METKNYSSSTSGFILLGLSSNPKLQKPLFAIFLIMYLLTAVGNVLIILAIYSDPRLHTPMYFFLSNLSFMDICFTTVIVPKMLVNFLSETKIISYVGCLIQMYFFMAFGNTDSYLLASMAIDRLVAICNPLHYDVVMKPWHCLLMLLGSCSISHLHSLFRVLLMSRLSFCASHIIKHFFCDTQPVLKLSCSDTSSSQMVVMTETLAVIVTPFLCTIFSYLQIIVTVLRIPSAARKWKAFSTCGSHLTVVVLFYGSVIYVYFRPLSMYSVMKGRVATVMYTVVTPMLNPFIYSLRNKDMKRGLKKLRHRIYS

SEQ ID NO: 92 - protein, 311 aa, Artificial Sequence
  Synthetic
METKNYSSSTSGFILLGLSSNPKLQKPLFAIFLIMYLLTAVGNVLIILAIYSDPRLHTPMYFFLSNLSFMDICFTTVIVPKMLVNFLSETKIISYVGCLIQMYFFMAFGNTDSYLLASMAIDRLVAICNPLHYDVVMKPWHCLLMLLGSCSISHLHSLFRVLLMSRLSFCASHIIKHFFCDTQPVLKLSCSDTSSSQMVVMTETLAVIVTPFLCTIFSYLQIIVTVLRIPSAAGKWKAFSTCGSHLTVVVLFYGSVIYVYFRPLSMYSVMKGRVATVMYTVVTPMLNPFIYSLRNKDMKRGLKKLRHRIYS

SEQ ID NO: 93 - protein, 311 aa, Artificial Sequence
  Synthetic
MEIKNYSSSTSGFILLGLSSNPQLQKPLFAIFLIMYLLAAVGNVLIIPAIYSDPRLHTPMYFFLSNLSFMDICFTTVIVPKMLVNFLSETKVISYVGCLAQMYFFMAFGNTDSYLLASMAIDRLVAICNPLHYDVVMKPRHCLLMLLGSCSISHLHSLFRVLLMSRLSFCASHIIKHFFCDTQPVLKLSCSDTSSSQMVVMTETLAVIVTPFLCIIFSYLRIMVTVLRIPSAAGKWKAFSTCGSHLTAVALFYGSIIYVYFRPLSMYSVVRDRVATVMYTVVTPMLNPFIYSLRNKDMKRGLKKLQDRIYR

SEQ ID NO: 94 - protein, 315 aa, Artificial Sequence
  Synthetic
KSRDMEIKNYSSSTSGFILLGLSSNPQLQKPLFAIFLIMYLLAAVGNVLIIPAIYSDPRLHTPMYFFLSNLSFMDICFTTVIVPKMLVNFLSETKVISYVGCLAQMYFFMAFGNTDSYLLASMAIDRLVAICNPLHYDVVMKPRHCLLMLLGSCSISHLHSLFRVLLMSRLSFCASHIIKHFFCDTQPVLKLSCSDTSSSQMVVMTETLAVIVTPFLCIIFSYLRIMVTVLRIPSAAGKWKAFSTCGSHLTAVALFYGSIIYVYFRPLSMYSVVRDRVATVMYTVVTPMLNPFIYSLRNKDMKRGLKKLQDRIYR

SEQ ID NO: 95 - protein, 309 aa, Artificial Sequence
  Synthetic
MLRENQSHMTEFLLLGLTSNPKQQVWLFASFLAMYLVNVIGNSVIIASIQRDARLHTPMYFFLSNLSLVDICFTTVIVPQMLVNLLTQRKTILFAQCLTQMYFFVAFGITDSFLLAAMAIDRYVAICNPLHYNTVMSPRRCRLLVVASWAVSHLHSLTHTILMGRLSFCGPNVIHHFFCDVQPLLTLSCSDTSINELLAFTEGSVVIMSPFIFIVVSYIYITRTVLRVPSGEGRYKVFSTCGSHLTVVALFYGTIISVYIRPSSTYSVTKDRVVTVIYTVVTPMLNPFIYSLRNKDMKQALRKLAKRTE

SEQ ID NO: 96 - protein, 315 aa, Artificial Sequence
  Synthetic
MMTRNHSSVSEFLLLGLSEHWEQEPLLFGIFLVIYLVTVVGNTLIILAIVSDPHLHSPMYFFLANLSLTDMCLSSTTVPRMLVNIQTQRHSIPYAGCLSQIYFFLWFIGLDVFLLAVMAYDRLVAICYPLHYTLVMSPRCCILLVTTSLFLAHSYALTHIILLSQLSFCMDNIILHFFCELLPMLKLSCSNTYANQCVLLYWGGALTVLIPLLIIVSYVRIVATIVRVPSASGKWKTFSTCGSHLSAVCLFYVSAIGVYFIPYAADSASRDRIASVMYAVVTPMLNPFIYSLRNKDMTSALRRFLNKILLQPPQS

SEQ ID NO: 97 - protein, 315 aa, Artificial Sequence; identical to SEQ ID NO: 96
  Synthetic

SEQ ID NO: 98 - protein, 316 aa, Artificial Sequence
  Synthetic
MEAANESSEGISFVLLGLTTSPGQQRPLFVLFLLLYVASLLGNGLIVAAIQASPALHAPMYFLLAHLSFADLCFASVTVPKMLANLLAHDHSISLAGCLTQMYFFFALGVTDSCLLAAMAYDCYVAIRHPLPYATRMSRAMCAALVGMAWLVSHVHSLLYILLMARLSFCASHQVPHFFCDHQPLLRLSCSDTHHIQLLIFTEGAAVVVTPFLLILASYGAIAAAVLQLPSASGRLRAVSTCGSHLAVVSLFYGTVIAVYFQATSRREAEWGRVATVMYTVVTPMLNPIIYSLWNRDVQGALRALLIGRRISASDS

SEQ ID NO: 99 - protein, 317 aa, Artificial Sequence
  Synthetic
MEAANESSEGISFVLLGLTTSPGQQRPLFVLFLLLYVASLLGNGLIVAAIQASPALHAPMYFLLAHLSFADLCFASVTVPKMLANLLAHDHSISLAGCLTQMYFFFALGVTDSCLLAAMAYDCYVAIRHPLPYATRMSRAMCAALVGMAWLVSHVHSLLYILLMARLSFCASHQVPHFFCDHQPLLRLSCSDTHHIQLLIFTEGAAVVVTPFLLILASYGAIAAAVLQLPSASGRLRAVSTCGSHLAVVSLFYGTVIAVYFQATSRREAEWGRVATVMYTVVTPMLNPIIYSLWNRDVQGALRALLIGRRISASDSA

SEQ ID NO: 100 - protein, 309 aa, Artificial Sequence [sequence omitted]

SEQ ID NO: 101 - protein, 309 aa, Artificial Sequence
  Synthetic
MRENNQSSTLEFILLGVTGQQEQEDFFYILFLFIYPITLIGNLLIVLAICSDVRLHNPMYFLLANLSLVDIFFSSVTIPKMLANHLLGSKSISFGGCLTQMYFMIALGNTDSYILAAMAYDRAVAISRPLHYTTIMSPRSCIWLIAGSWVIGNANALPHTLLTASLSFCGNQEVANFYCDITPLLKLSCSDIHFHVKMMYLGVGIFSVPLLCIIVSYIRVFSTVFQVPSTKGVLKAFSTCGSHLTVVSLYYGTVMGTYFRPLTNYSLKDAVITVMYTAVTPMLNPFIYSLRNRDMKAALRKLFNKRISS

SEQ ID NO: 102 - protein, 313 aa, Artificial Sequence
  Synthetic
MREENESSTIDFTLLGVTRQREQEYFFFILFLFIYPITVFGNMLIILAIHSDTRLHNPMYFFLANLSLVDIFFSSVTIPKMLANHLLGSKAISFGGCMAQMYFMIGLGNTDSYILAAMAYDRAVAISRPLHYATIMSPQLCVLLVAGSWVIANANALPHTLLTARLSFCGNKDVANFYCDITPLLQLSCSDIRFNVKMMYLGVGVFSVPLLCIIISYVRVFSTVLRVPSTKGFLKALSTCGSHLTVVSLYYGTVMGMYFRPLTSYSLKHALITVMYTAVTPMLNPFIYSLRNRDMKAALKKLFHCPSSSSSLM

SEQ ID NO: 103 - protein, 313 aa, Artificial Sequence
  Synthetic
MREENESSTTDFTLLGVTRQREQEYFFFILFLFIYPITVFGNMLIILAIHSDTRLHNPMYFFLANLSLVDIFFSSVTIPKMLANHLLGSKAISFGGCMAQMYFMIGLANTDSYILAAMAYDRAVAISRPLHYATIMSPQLCVLLVAGSWVIANANALPHTLLTARLSFCGNKDVANFYCDITPLLQLSCSDIRFNVKMMYLGVGVFSVPLLCIIISYVRVFSTVLRVPSTKGFLKALSTCGSHLTVVSLYYGTVMGMYFRPLTSYSLKHALITVMYTAVTPMLNPFIYSLRNRDMKAALKKLFHCPSSSSSLM

SEQ ID NO: 104 - protein, 313 aa, Artificial Sequence
  Synthetic
MREENESSTIDFTLLGVTRQREQEYFFFILFLFIYPITVFGNMLIILAIHSDTRLHNPMYFFLANLSLVDIFFSSVTIPKMLANHLLGSKAISFGGCMAQMYFMISLGNTDSYILAAMAYDRAVAISRPLHYATIMSPQLCVLLVAGSWVIANANALPHTLLTARLSFCGNKDVANFYCDITPLLQLSCSDIRFNVKMMYLGVGVFSVPLLCIIISYVRVFSTVLRVPSTKGFLKALSTCGSHLTVVSLYYGTVMGMYFRPLTSYSLKHALITVMYTAVTPMLNPFIYSLRNRDMKAALKKLFHCHSSSSSLM

SEQ ID NO: 105 - protein, 309 aa, Artificial Sequence
  Synthetic
MKKENQSFNLDFILLGVTSQQEQNNVFFVIFLCIYPITLTGNLLIILAICADIRLHNPMYFLLANLSLVDIIFSSVTIPKVLANHLLGSKFISFGGCLMQMYFMIALAKADSYTLAAMAYDRAVAISCPLHYTTIMSPRSCILLIAGSWVIGNTSALPHTLLTASLSFCGNQEVANFYCDIMPLLKLSCSDVHFNVKMMYLGVGVFSLPLLCIIVSYVQVFSTVFQVPSTKSLFKAFCTCGSHLTVVFLYYGTTMGMYFRPLTSYSPKDAVITVMYVAVTPALNPFIYSLRNWDMKAALQKLFSKRISS

SEQ ID NO: 106 - protein, 309 aa, Artificial Sequence; identical to SEQ ID NO: 105
  Synthetic

SEQ ID NO: 107 - protein, 312 aa, Artificial Sequence
  Synthetic
MDGDNQSENSQFLLLGISESPEQQRILFWMFLSMYLVTVLGNVLIILAISSDSHLHTPMYFFLANLSFTDLFFVTNTIPKMLVNFQSQNKAISYAGCLTQLYFLVSLVTLDNLILAVMAYDRYVATCCPLHYVTAMSPGLCVLLLSLCWGLSVLYGLLLTFLLTRVTFCGPREIHYLFCDMYILLWLACSNTHIIHTALIATGCFIFLTPLGFMTTSYVRIVRTILQMPSASKKYKTFSTCASHLGVVSLFYGTLAMVYLQPLHTYSMKDSVATVMYAVLTPMMNPFIYRLRNKDMHGAPGRVLWRPFQRPK

SEQ ID NO: 108 - protein, 312 aa, Artificial Sequence
  Synthetic
MDGDNQSENSQFLLLGISESPEQQQILFWMFLSMYLVTVLGNVLIILAISSDSHLHTPMYFFLANLSFTDLFFVTNTIPKMLVNFQSQNKAISYAGCLTQLYFLVSLVTLDNLILAVMAYDRYVAICCPLHYVTAMSPGLCVLLLSLCWGLSVLYGLLLTFLLTRVTFCGPREIHYLFCDMYILLWLACSNTHIIHTALIATGCFIFLTLLGFMTTSYVRIVRTILQMPSASKKYKTFSTCASHLGVVSLFYGTLAMVYLQPLHTYSMKDSVATVMYAVLTPMMNPFIYSLRNKDMHGAPGRVLWRPFQRPK

SEQ ID NO: 109 - protein, 312 aa, Artificial Sequence
  Synthetic
MDGGNQSEGSEFLLLGMSESPEQQRILFWMFLSMYLVTVVGNVLIILAISSDSRLHTPVYFFLANLSFTDLFFVTNTIPKMLVNLQSHNKAISYAGCLTQLYFLVSLVALDNLILAVMAYDRYVAICCPLHYTTAMSPKLCILLLSLCWVLSVLYGLIHTLLMTRVTFCGSRKIHYIFCEMYVLLRMACSNIQINHTVLIATGCFIFLIPFGFVIISYVLIIRAILRIPSVSKKYKAFSTCASHLGAVSLFYGTLCMVYLKPLHTYSVKDSVATVMYAVVTPMMNPFIYSLRNKDMHGALGRLLDKHFKRLT

SEQ ID NO: 110 - protein, 312 aa, Artificial Sequence
  Synthetic
MDGGNQSGDSEFLLLGLSEVPEHQRILFWTFLSMYLVTVVGNVLIILAIGSDSHLHTPMYFFLANLSFTDLFFVTNTIPKMLVSLQSQNKAISYPGCLTQLFFLVSLVALDNLILAVMAYDRYVAICHPLHYTTAMSPKLCILLLILCWALSILYGLIHTLLMTRVTFCGSRKIHYIFCEMYVLLRLACSNTHINHMMLIATGCFVFLVPFGFMIMSYICIVRAILKIPSASNKYKAFSTCASHLAVVALFYGTLCMVYLKPLHTYSMKDSVATVMYAVVTPMMNPFIYSLRNKDMHGALGRLLRKPLQKLT

SEQ ID NO: 111 - protein, 312 aa, Artificial Sequence
  Synthetic
MSKGRENETGVSEFLLLGITNDPQQQQILFWAFLCMYLVTVAGNTLIFLAIISDPRLHTPMYFFLANLSFVDVCFTTNLIPRLLAGHVAGTRTISYVHCLTQTYFLISFANVDTFLLAAMALDRFVAICYPLQYHTIITPQLCVGLAAVVWMCSALISLMHTLLMSRLSFCSSPEISHFYCDAYLLMKLACSDTRVNQLVFLGAVVLFVAPCILIVVSYVRITMVVLQIPSAKGRHKTFSTCSSHLSVVTLFYGTVLGIYIRPPDSFSTQDTVATIMYTVVTPMLNPFIYSLRNKDMKESVTRLLNRGSKSS

SEQ ID NO: 112 - protein, 312 aa, Artificial Sequence; identical to SEQ ID NO: 111
  Synthetic

SEQ ID NO: 113 - protein, 312 aa, Artificial Sequence
  Synthetic
MSKGRENETGVSEFLLLGITNDPQQQQILFWAFLCMYLVTVAGNTLIFLAIISDPCLHTPMYFFLANLSFVDVCFTTNLIPRLLAGHVAGTRTISYAQCLTQMFFMISFAHVDTLLLAAMALDRFVAICYPLQYHTIITPQLCVGLAAVVWMCSALISLMHTLLMSRLRFCSSPEISHFYCDAYLLMKLACSDTRVNQLASLGTLFLFVAPCILIVVSYVRITMAVFQIPSAKGRHKAFSTCSSHLSVVILFYGTILGIYIRPPGSFSIQVSVATIMYTVVTPMLNPFIYSLRNKDMKETVTRILNRDSKPS

SEQ ID NO: 114 - protein, 309 aa, Artificial Sequence
  Synthetic
MEPENDTGISEFVLLGLSEEPELQPFLFGLFLSMYLVTVLGNLLIILATISDSHLHTPMYFFLSNLSFADICFISTTIPKMLINIQTQSRVITYAGCITQMCFFVLFGGLDSLLLAVMAYDRFVAICHPLHYTVIMNPRLCGLLVLASWMIAALNSLSQSLMVLWLSFCTDLEIPHFFCELNQVIHLACSDTFLNDMGMYFAAGLLAGGPLVGILCSYSKIVSSIRAISSAQGKYKAFSTCASHLSVVSLFCCTGLGVYLTSAATHNSHTSATASVMYTVATPMLNPFIYSLRNKDIKRALKMSFRGKQ

SEQ ID NO: 115 - protein, 309 aa, Artificial Sequence; identical to SEQ ID NO: 114
  Synthetic

SEQ ID NO: 116 - protein, 309 aa, Artificial Sequence
  Synthetic
MKSWNNTIILEFLLLGISEEPELQAFLFGLFLSMYLVTVLGNLLIILATISDSHLHTPMYFFLSNLSFVDICFVSTTVPKMLVNIQTHNKVITYAGCITQMCFFLLFVGLDNFLLTVMAYDRFVAICHPLHYMVIMNPQLCGLLVLASWIMSVLNSMLQSLMVLPLPFCTHMEIPHFFCEINQVVHLACSDTFLNDIVMYFAVALLGGGPLTGILYSYSKIVSSIRAISSAQGKYKAFSTCASHLSVVSLFYGTCLGVYLSSAATHNSHTGAAASVMYTVVTPMLNPFIYSLRNKHIKGAMKTFFRGKQ

SEQ ID NO: 117 - protein, 309 aa, Artificial Sequence; identical to SEQ ID NO: 116
  Synthetic

SEQ ID NO: 118 - protein, 318 aa, Artificial Sequence
  Synthetic
MEPGNDTQISEFLLLGFSQEPGLQPFLFGLFLSMYLVTVLGNLLIILATISDSHLHTPMYFFLSNLSFADICVTSTTIPKMLMNIQTQNKVITYIACLMQMYFFILFAGFENFLLSVMAYDRFVAICHPLHYMVIMNPHLCGLLVLASWTMSALYSLLQILMVVRLSFCTALEIPHFFCELNQVIQLACSDSFLNHMVIYFTVALLGGGPLTGILYSYSKIISSIHAISSAQGKYKAFSTCASHLSVVSLFYGAILGVYLSSAATRNSHSSATASVMYTVVTPMLNPFIYSLRNKDIKRALGIHLLWGTMKGQFFKKC

SEQ ID NO: 119 - protein, 309 aa, Artificial Sequence
  Synthetic
MELKNDTQISKFILLGISEDPLWQPFLFGLFLFMYLVTLLGNLLIIIATITDSHLHTPMYFFLSNLSFADICFTSASIPKMLVNIQTKNKVITYEGCISQVFFFILFGVLDNFLLAVMAYDRYVAICHPLHYMVIMNCRLCGFLVLGSWVTTALNSLLQSSMALRLSFCTDLKIPHFVCELNQLVLLACNDTFPNDMVMYFAAILLGGGPLAGILYSYSKIVSSIRAISSSQGKYKAFSTCASHLSVVSLFYSTLLGVYLSSSFTQNSHSTARASVMYSVVTPMLNPFIYSLRNKDLMGALRRLLRRKS

SEQ ID NO: 120 - protein, 309 aa, Artificial Sequence; identical to SEQ ID NO: 119
  Synthetic

SEQ ID NO: 121 - protein, 309 aa, Artificial Sequence
  Synthetic
MEPRNNTHILEFFLLGFSQDPNLQPVICGLFLSMYLITVVGNLLIILTIISDANLHTPMYFFLSNLSFVDICFVSTTVPKMLVNIQTKRKSISYADCITQMYFFLIFVELDNFLLAVMAYDRYVAICHPLHYTGIMNRRLCGFLVLVCWIVSVLHALLQSMMVLRLSFCTDLEIPHFFCELNQVAQLTCSDTFLNDVVMYFALVLLAIVPLFGILYSYSKIVSSIRAMSTVQGKYKAFSTCASHLSVVSLFYFTGLGVYLSSAVSHSSQASATASVMYTVVTPMLNPFIYSLRNKDVKGALKRLLGVKL

SEQ ID NO: 122 - protein, 309 aa, Artificial Sequence; identical to SEQ ID NO: 121
  Synthetic

SEQ ID NO: 123 - protein, 309 aa, Artificial Sequence
  Synthetic
MDSSNRTRVAEFLLLGFLENKDLQPIIYGLFLSMYLVTVVGNMLIIVAIISGPRLHTPMYFFLSNLSFVDICFISTTIPKMLVNIQTQNKVITYAGCITQIYFFLLFVELDNFLLTIMAYDRYVAICHPMRYTVIMNYQLCGFLVLVSWIVSVLHALFQSLMMLELPFCTQPEIPHFFCEPNQVIQLTCSDAFLNDMVIYFTLVLLAIVPLAGVFYSYFKIVSSIRAMSSVHGKYKAFSTCASHLLVVSLFYCTGLGVYLSSAANHGSQTSATASVTYTVVTPMMNPFIYSLRNKDVKSALKRLFVRKL

SEQ ID NO: 124 - protein, 318 aa, Artificial Sequence
  Synthetic
METGNDTQLSEFFLLGFSENPQIQPVIFGLFLFMYILTFTGNLLIIMAIIVDSHLHTPMYLFLSNLSFVDICFTSTTVPQMLVNIHTQSKAITYAGCIIQMYFLLLFSGLDIFLLTVMAYDRYVAICHPLHYMIIMSTRRCGLMILACWIIGVINSLLHTFLVLRLSFCTNLEIPHFFCELNQVVHQACSDTFLNDMVIYITAMLLAVGPFSGILYSYSRIVSSICAISSVQGKYKAFSTCASHLSVVSLFYCTLLGVYLSSAVTQNSHATATASLMYTVVTPMLNPFIYSLRNKDIKTALKILLGSVTRSRSMDSPS

SEQ ID NO: 125 - protein, 318 aa, Artificial Sequence
  Synthetic
MEPGNDTQLSEFFLLELSENPQIQPLIFGLFLSMYLVTVTGNLLIIMAITADSHLHTPMYIFLSNLSFVDICFTSTTVPQMLVTIHTQSKAITYANCITQVYFLLLFSVLDIFLLTVMAYDHYVAICHPLHYMIIMNTRRCGLMILACWIIGVINSLLHTFLALRLSFCTDLEIPHFYCELNQVVHHACSDISLNDMVIYIAAMLLVVGPLSGILYSYSKIVSSICAISSVQGKYKAFSTCASHLSVVSLFYCTLLGVYLSSAVTQNAQATALASLMYTVVTPMLNPFIYSLRNNDMKKALKIVLGRVTRNRLTDLPS

SEQ ID NO: 126 - protein, 310 aa, Artificial Sequence
  Synthetic
MESGNRTRRISSFFLLGFSENPHLQFLIFVLFLSMYLVTVLGNLLIIMVTITQSPLHTPMYFFLANLSFVDICFTSTTVPKMLVNIQTQSKAITYADCISQMSVFLVFGELDNFLLAVMAYDRYVAICHPLYYTVIVNQQLCMLMVLLSWVVSILHAFLQSSIVLQLTFCGDVKIPHFFCELNQLSQLTCSDSLSSHLIMHLVPVLLGAISFSSILYSYFKIVSSICSISSVQGKYKAFSTCVSHLSIVSLFYSTGLGVYVSSAVVQSSHSAARASVMYTVVTPMLNPFIYSLRNKDVKKAVERLLEGKL

SEQ ID NO: 127 - protein, 310 aa, Artificial Sequence
  Synthetic
MESGNSTRRIPSFFLLGFSENPHLQFLIFVLFLSMYLVTVLGNLLIIMVIITQSPLHTPMYFFLANLSFVDICFTSTTVPKMLVNIQTQSKAITYADCISQMSVFLVFAELDNFLLAVMAYDRYVAICHPLYYTFIVNQHLCILMVLLSWVVSILHAFLQSSIVLQLTFCGDVKIPHFFCELNQLSQLTCLDSLSSHLIMNLVPVLLAVISFSSILYSYFKIVSSICSISSVQGKYTAFSTCVSHLSIVFLFYSTGLGVYVSSAVVQSSHSAARASVMYTVVTPMLNPFIYSLRNKDVKKALERLLEGKL

SEQ ID NO: 128 - protein, 319 aa, Artificial Sequence
  Synthetic
MERGNQTEVGNFLLLGFAEDSDMQLLLHGLFLSMYLVTIIGNLLIILTISSDSHLHTPMYFFLSNLSFADICFTSTTVPKMLVNIQTQSKMITFAGCLTQIFFFIAFGCLDNLLLTMTAYDRFVAICYPLHYTVIMNPRLCGLLVLGSWCISVMGSLLETLTILRLSFCTNMEIPHFFCDPSEVLKLACSDTFINNIVMYFVTIVLGVFPLCGILFSYSQIFSSVLRVSSARGQHKAFSTCGSHLSVVSLFYGTGLGVYLSSAVTPPSRTSLAASVMYTMVTPMLNPFIYSLRNKDMKGSLGRLLLRATSLKEGTIAKL

SEQ ID NO: 129 - protein, 318 aa, Artificial Sequence
  Synthetic
MERGNQTEVGNFLLLGFAEDSDMQLLLHGLFLSMYLVTIIGNLLIILTISSDSHLHTPMYFFLSNLSFADICFTSTTVPKMLVNIQTQSKMITFAGCLTQIFFFIAFGCLDNLLLTMTAYDRFVAICYPLHYTVIMNPRLCGLLVLGSWCISVMGSLLETLTILRLSFCTNMEIPHFFCDPSEVLKLACSDTFINNIVMYFVTIVLGVFPLCGILFSYSQIFSSVLRVSARGQHKAFSTCGSHLSVVSLFYGTGLGVYLSSAVTPPSRTSLAASVMYTMVTPMLNPFIYSLRNKDMKGSLGRLLLRATSLKEGTIAKL

SEQ ID NO: 130 - protein, 319 aa, Artificial Sequence
  Synthetic
METGNQTHAQEFLLLGFSATSEIQFILFGLFLSMYLVTFTGNLLIILAICSDSHLHTPMYFFLSNLSFADLCFTSTTVPKMLLNILTQNKFITYAGCLSQIFFFTSFGCLDNLLLTVMAYDRFVAVCHPLHYTVIMNPQLCGLLVLGSWCISVMGSLLETLTVLRLSFCTEMEIPHFFCDLLEVLKLACSDTFINNVVIYFATGVLGVISFTGIFFSYYKIVFSILRISSAGRKHKAFSTCGSHLSVVTLFYGTGFGVYLSSAATPSSRTSLVASVMYTMVTPMLNPFIYSLRNTDMKRALGRLLSRATFFNGDITAGL

SEQ ID NO: 131 - protein, 319 aa, Artificial Sequence
  Synthetic
METGNQTHAQEFLLLGFSATSEIQFILFGLFLSMYLVTFTGNLLIILAICSDSHLHTPMYFFLSNLSFADLCFTSTTVPKMLLNILTQNKFITYAGCLGQIFFFTSFGCLDNLLLTVMAYDRFVAICHPLHYTVIMNPQLCGLLVLGSWCISVMGSLLETLTVLRLSFCTKMEIPHFFCDLLEVLKLACSDTFINNVVIYFATGVLGVIPFTGIFFSYYKIVFSILRISSAGRKHKAFSTCGSHLSLVTLFYGTGFGVYLSSAATPSSRTSLVASVMYTMVTPMLNPFIYSLRNTDMKRALGRLLSRATFFNGDNTAGL

SEQ ID NO: 132 - protein, 318 aa, Artificial Sequence
  Synthetic
MERENQTGERNFLLLGFTEDSDLQSFFFGLLLSMYLVTITGNLLIIVAIISDPHLHMPMYLFLSNLSIADIGFTSTTIPKVLQNIRTQSKFISFSGCITQIFFFIVFGCLDNLLLSVMAYDRFVAICHPLHYVVIMNSCFCAMLALGSWIVSVMSSLPETLTVLRLSFCTNMEIPHFFCDLPEVLKLACSDTLVNNIVTYSITIVIAGFPFSGILLSYSKIFSSILRIPSAGGKYKAFSTCGSHLLVVFLFYSNGLGVYLSSAATSSSRMSLVASLMYSIVTPMLNPFIYSLRNKDMQKALGKLLRKIMLLGEGTMVG

SEQ ID NO: 133 - protein, 319 aa, Artificial Sequence
  Synthetic
MERENQTGERNFLLLGFTEDSDLQSFFFGLLLSMYLVTITGNLLIIVAIISDPHLHMPMYLFLSNLSIADIGFTSTTIPKVLQNIRTQSKFISFSGCITQIFFFIVFGCLDNLLLSVMAYDRFVAICHPLHYVVIMNSCFCAMLALGSWIVSVMSSLPETLTVLRLSFCTNMEIPHFFCDLPEVLKLACSDTLVNNIVTYSITIVIAGFPFSGILLSYSKIFSSILRIPSAGGKYKAFSTCGSHLLVVFLFYSNGLGVYLSSAATSSSRMSLVASLMYSIVTPMLNPFIYSLRNKDMQKALGKLLRKIMLLGEGTMVGL

SEQ ID NO: 134 - protein, 312 aa, Artificial Sequence
  Synthetic
MEPENHTGIPEFYLLGLSENPEIQSVLFGLFLSLYLVTVFGNLLIILAIVSDPKLHTPMYLFLSNLSFSDICFTSTTVPKMLLGIQTQSKLITYAGCITQMYFFTVFGLLDNLLLTVMAYDRFVAICHPLHYTVLMNPKLCSQLLLLAWLISILGALPESLTALRLSFCAVVEIPHYFCELPEVLKLACSDTFINNVVLYIVTGIMGFFPLAGILFSYSQIVTSVLRISTVGGKYKAFSTCGSHLSVVSLFYGTCLGVYLSSIWTQASWAGVFASVLYTVVTPMMNPFIYSLRNRDMKRALNTLLCSVPSSS

SEQ ID NO: 135 - protein, 311 aa, Artificial Sequence
  Synthetic
MKPENQTNILEFLLLGFSQYPEHQPMLFGLFLLMFVVAVLGNLLIILAVSIDSHLHTPMYFFLSNLSFSDIGFISTTVPKMLVNIQTQSKSISYAECITQIYFFMLFGGMDTLLLTVMAYDRFVAICHPLHYSVIMNPQLSGLLVLVSWFISFSYSLIQSLLMLRLSFCTNQIIKHFYCEYAKALTIACSDTLINHILLYIVIWVLGFIPFSGILYSYYKIFSSILRIPSTDGKYKAFSTCGSHLSVVSLFYGTGLSVYLSSDATSSSGKGVVASVMYTVVTPMLNPFIYSLRNKDIKKALKTLGRILLLK

SEQ ID NO: 136 - protein, 311 aa, Artificial Sequence; identical to SEQ ID NO: 135
  Synthetic

SEQ ID NO: 137 - protein, 311 aa, Artificial Sequence
  Synthetic
MKPENQTNILEFLLLGFSQYPEHQPMLFGLFLLMFVVAVFGNLLIILAVSIDSHLHTPMYFFLSNLSFSDIGFISTTIPKMLVNIQTQSKSISYAECITQIYFFMLFGGMDILLLTVMAYDRFVAICHPLHYSVIMNPQLSGLLVLVSWFISFSYSLIQSLLMLRLSFCTNQIIKHFYCEYSRALTIACSDTLINHILLYILICVLGFIPFSGILYSYCKIVSSILRIPSTDGKYKAFSTCGSHLSVVSLFYGTGLGVYLSSDVTSSSGKDVVASVMYTVVTPMLNPFIYSLRNKDIKKALKTLGRILLLK

SEQ ID NO: 138 - protein, 318 aa, Artificial Sequence
  Synthetic
MEIENHTLITKFLILGLSDDPELQPILFGLFLSMYLVTLLGNLLIILAVSSDSHLHKPMYFLLSNLSFIDICFISTTIPKMLVNMQSQIKDISYIECLTQVFFFNIFAGMDNFLLTLMAYDRFVAICHPLNYTVIMNPRLCALLILMFWIIMFWVSLIHVLLMNELNFSRGTEIPHFFCELAQVLKVSNSDNHVNNVFMYVVTSLLGVIPMTGILMSYSQIFSSLFRMSSTVSKYKAFSTCGSHLCVVTLFYGSGFGVYFSSSVVHSTQRRKVASLMYTVISPMLNPFIYTLRNKDVKGALGKLFNRVASSPSCINDI

SEQ ID NO: 139 - protein, 311 aa, Artificial Sequence
  Synthetic
MGKENHTELSQFLLLGLSDDPKLQPILFGIFLFMYLVTVLGNLLIILAVSSDSHLHNPMYFFLSNLSFVDMCFTSTTVPKMLVNIQTKNKNISYMQCLTQVYFFMVFAGMDNFLLTVMAFDRFVAICHPLNYTVIMNPHFCCFLVLMCWIIILSVSLFHSLLMKQLTFSMGTEIPHFFCELAQILRVASSDILINNIALYVATALLCVFPVTGILFSYSQIVSSLLNMSSVVSKYRAFSTCGSHLCVVCLFYGTALGVYLSSAGTDVSQGSTIASVMYTVVTPMLNPFIYSLRNKDVKGALVRILKVYSCP

SEQ ID NO: 140 - protein, 311 aa, Artificial Sequence; identical to SEQ ID NO: 139
  Synthetic

SEQ ID NO: 141 - protein, 312 aa, Artificial Sequence
  Synthetic
MEAENLTELSKFLLLGLSDDPELQPVLFGLFLSMYLVTVLGNLLIILAVSSDSHLHTPMYFFLSNLSFVDICFISTTVPKMLVSIQARSKDISYMGCLTQVYFLMMFAGMDTFLLAVMAYDRFVAICHPLHYTVIMNPCLCGLLVLASWFIIFWFSLVHILLMKRLTFSTGTEIPHFFCEPAQVLKVACSNTLLNNIVLYVATALLGVFPVAGILFSYSQIVSSLMGMSSTKGKYKAFSTCGSHLCVVSLFYGTGLGVYLSSAVTHSSQSSSTASVMYAMVTPMLNPFIYSLRNKDVKGALERLLSRADSCP

SEQ ID NO: 142 - protein, 312 aa, Artificial Sequence
  Synthetic
MEAENHTAIVHFLLIGLSEDPKIQSVLFGLFLSMFLITMLGNFLIVLVTSCDSHLHTPMYFFLCNLSFVDICLTSTTIPKMLVNIYMHTMKISYTECLTQVYFFNNFLGMDNFLLTIMAYDRFVAICHPLNYTVIMNPRICGLLVLLSWIIMFWVSLIHMLLMKQLNFSTSTEIPHFFCELTELLRVARSDTHINNIFLYLVTAVLGMFPVIGIAFSYFHIVSALMKMSSIKNKYKAFSTCGSHLCVVSMFYGTGFVVHLSSAVAHSSKRNTITSIMYTVVTPMLNPFIYSLRNKDVKGALVRLLRRVKFCP

SEQ ID NO: 143 - protein, 312 aa, Artificial Sequence; identical to SEQ ID NO: 142
  Synthetic

SEQ ID NO: 144 - protein, 312 aa, Artificial Sequence
  Synthetic
MEAGNQTGFLEFILLGLSEDPELQPFIFGLFLSMYLVTVLGNLLIILAISSDSHLHTPMYFFLSNLSWVDICFSTCIVPKMLVNIQTENKAISYMDCLTQVYFSMFFPILDTLLLTVMAYDRFVAVCHPLHYMIIMNPHLCGLLVFVTWLIGVMTSLLHISLMMHLIFCKDFEIPHFFCELTYILQLACSDTFLNSTLIYFMTGVLGVFPLLGIIFSYSRIASSIRKMSSSGGKQKALSTCGSHLSVVSLFYGTGIGVHFTSAVTHSSQKISVASVMYTVVTPMLNPFIYSLRNKDVKGALGSLLSRAASCL

SEQ ID NO: 145 - protein, 295 aa, Artificial Sequence
  Synthetic
MGLSDDLQLQPILFGLFLSMYLVTLLGNLLIILTVSSDSHLHSPMYFFLSNLSLADVSFTSTTLPKMIVDIQTHNRAISYSGCLTQMSFFMLFGCLDSLLLTAMAYDRFVAICHPLHYQFIMNPRLCGLLVFLSVLISLFVSQLHNSVVLQLTYFKSVDISHFFCDPSQLLNLACSDTFTNNIVMYFVGAISGFLPISGIFFSYYKIVSSILRMPSPGGKYKAFSTCGSHLSVVCLFYGTGLGVYLSSAVSLSPRKGAVASIVYTVVTPMLNPFIYSLRNQDIKRAMWRLLRKTV

SEQ ID NO: 146 - protein, 295 aa, Artificial Sequence; identical to SEQ ID NO: 145
  Synthetic

SEQ ID NO: 147 - protein, 313 aa, Artificial Sequence
  Synthetic
CSNNIELQNLTLVSEFHLMRISDDPELQPILFGLFLSMYLVTVLGNLIIILAVNSDSNLHTPMYFFLCNLSLADICFISTTVPKMIVNIQTHSKEIIYVGCLTQMSFLILFGCMDGLLLTVMAYDRFVAVCHPLHYSLIMNPRLCGSLVCLSLLISLVDSQAHNLIALQIIYFKDVKISNFFCDPAQLLNLACFNTFINNIVMYFVGAISGLLPISGIFFSYYKIVFSILKIPSKGGRYKAFSTCGSHLSVVCLFYGTAIGVYLGSAVSHSPRSTAVASLIYTVVTPMLNPFIYSLRNKDIKRAVKRLHRRML

SEQ ID NO: 148 - protein, 323 aa, Artificial Sequence
  Synthetic
CPSYTEPQNLTGVSEFLLLGLSEDPELQPVLAGLFLSMYLVTVLGNLLIILAVSSDSHLHTPMYFFLSNLSLADIGFTSTTVPKMIVDMQTHSRVISYEGCLTQMSFFVLFACMDDMLLSVMAYDRFVAICHPLHYRIIMNPRLCGFLILLSFFISLLDSQLHNLIMLQLTCFKDVDISNFFCDPSQLLHLRCSDTFINEMVIYFMGAIFGCLPISGILFSYYKIVSSILRVPTSDGKYKAFSTCGSHLAVVCLFYGTGLVGYLSSAVLPSPRKSMVASVMYTVVTPMLNPFIYSLRNKDIQSALCRLHGRIIKSHHLHPFCY

SEQ ID NO: 149 - protein, 323 aa, Artificial Sequence
  Synthetic
CPSYTEPQNLTGVSEFLLLGLSEDPELQPVLAGLFLSMYLVTVLGNLLIILAVSSDSHLHTPMYFFLSNLSLADIGFTSTTVPKMIVDMQTHSRVISYEGCLTQMSFFVLFACMDDMLLSVMAYDRFVAICHPLHYRIIMNPRLCGFLILLSFFISLLDSQLHNLIMLQLTCFKDVDISNFFCDPSQLLHLRCSDTFINEMVIYFMGAIFGCLPISGILFSYYKIVSPILRVPTSDGKYKAFSTCGSHLAVVCLFYGTGLVGYLSSAVLPSPRKSMVASVMYTVVTPMLNPFIYSLRNKDIQSALCRLHGRIIKSHHLHPFCY

SEQ ID NO: 150 - protein, 312 aa, Artificial Sequence
  Synthetic
MINNDVENLKDVLEFHLMALSEDPELQLLLFGLFLSVYLVTVLGNLLIILIIIFDSNLHNPMYFFLSNLSLIDILFISTTIPKMIVGIKMHSRVISYAGCLTQMSLFLFFVCMDDMILNVMAYDRFVAICHPLHYTVLMNPQVCVILILLSFSVSVFDSQLHNLIALQDTCFRDVEIANFFCHPSQLLNLACTNTLSSNIVIYFIGVILGIFPVLGIILSYCKIVFSILKIPSSSGKYKAFSTCGSHLLVVCLFYGTGIGVYLGSAVSHSPRKNAVASLMYTAVSPMLNPFIYTLRNRDISNALKRFHSRFS

SEQ ID NO: 151 - protein, 309 aa, Artificial Sequence
  Synthetic
MMKLKMENITYVSQFYLLRVSDDPELQPFLSGLFLSMYLISVLGNLIIILIVSSFSHLHTPMYFFLSILSLADIGFISTTVPNMIAELQIHSPVISYVGCLTQMSLFIIFACMDSMLLAVMAYDRFVAICHPLRYAIIMNPCRCGILVLMSFSASLFESLLHNLVALQLKCFKDVAIANFFCHPSQLLNLSCNNTFNNNILMYVIGVILGVFPLSGILISYFKIISSILRITSSSGRYKAFSTCGSHLAVVCLFYGTGLGEYFGSLLSHSSGNNVVASLMYTVVTPMLNPFIYSLRNQDISDSLKRLHF

SEQ ID NO: 152 - protein, 295 aa, Artificial Sequence
  Synthetic
MSLSENVELQPFLLVLFLSFYMVTVLGNLLIILAVCSDFHLHTPMYFFLSNLSWSDICLISTIVPRMIWDIGTQSRVISYVSCLTQMSMFIVFGCMDSMLLTVMAYDRFVAICHPLHYKIIMNPNLCAFLLLASVLASLVDSQVHNLIVLQFTYFNDMEISNFFCDPSQLLNHNCSEMFTKNIVIHFIGVFFGLFSTTGIIFSYYKIISSILRIPTKDGKYKAFSTCGSHLSVVCLFYGTSIGVYIGSTASNSPKNCAIASLMYTVVTPMLNPFIYSLRNRDIKTALWQLQRRAM

SEQ ID NO: 153 - protein, 295 aa, Artificial Sequence
  Synthetic
MSLSENVEVQPFLLVLFLSFYMVTVLGNLLIILAVCSDFHLHTPMYFFLSNLSWSDICLISTIVPRMIWDIGTQSRVISYVSCLTQMSMFILFACMDSMLLTVMAYDRFVAICHPLHYKIIMNPNLCAFLLLASVLASLVDSQVHNLIVLQFTHFSGMEISNFYCDPSQLLNLNCSEMFTKSIVIHFIGVFFGLFSTTGIISSYYKIISSILRIPSKDGKYKAFSTCGSHLSVVCLFYGTATAVYIGSTSSYSPENCAVASLMYTVVIPMLNPFIYSLRNRDIKIALRKLQRRAI

SEQ ID NO: 154 - protein, 309 aa, Artificial Sequence
  Synthetic
MEPYNLTGTLEFILLGLSEDPELQLILFALFLLIYLLTMLGNVLIILAISCDSHLHSPMYFFLYNLSLSDMGFSSTTIPKMLINLHAHKRSTTYAECLTQVSFFILFGCMDSFLLAVMAYDRWVAICHPLHYQVILNPCRCRYLVVMSFCISLIDSQVHCFMVSQLTFCTNIEIPHFFCDVPELVKLACSNTTINDIAMFLSSIIVGFLPASGIFYSYYKITSSIFRVPSLLGKYKAFSTCGSHLSVVCLFYGTGIGVYLSSTVSGSSRESMVASVMYTMVVPMMNPFIYSLRNRDIKKALWKIVCKIT

SEQ ID NO: 155 - protein, 309 aa, Artificial Sequence
  Synthetic
MEPYNLTGTLEFILLGLSEDPELQLILFALFLLIYMLTVLGNVLIILAISSDSHLHSPMYFFLYNLSLSDMGFSSTTIPKMLINLHAHNRSITYAECLTQVSFFFLFGGMDSLLLAVMAYDRWVAICHPLYYQVILSPCLCRCLVIVSLFISLVSSQVHCLLVSQLTFCINVEIPHFFCDVPELVKLACSNTTISDIVIFLLGIILGFLPASGIFYSYYKITSSIFRVPSLLGKYKAFSTCGSHLSVVCLFYGTGIGVYLSSTVSSSSRESMVASVMYTMVVPMMNPFIYSLRNRDIKKALWKIVRQIT

SEQ ID NO: 156 - protein, 317 aa, Artificial Sequence
  Synthetic
MELYNLTSNLEFLLLGLSEDPELQPVLFALFLLIYLLTVLGNVLIILAISCDSHLHSPMYFFLYNLSLSDMGFSSTTIPKMLINLHAHNRTITYAECLTQVSFFFLFGCMDSVLLAVMAYDRWVAICHPLHYQVILNPRLCRYLVVMSFCISLIDSQVHCFMVSQLKFCTNIKIPHFFCDVPELLKLACSDTSINSIVIFLVSIIVGFLPASGIFYSYYKIISSIVRVPSSGGKCKAFSTCGSHLSVVCLFYGTGLGVYLSSSISSSSKESVVTSVMYTMVVPMINPFIYSLRNKDIKKALQKIFSQIIMLPTYIIP

SEQ ID NO: 157 - protein, 306 aa, Artificial Sequence
  Synthetic
MEPYNLTGALEFLLLGLSEDPELQPVLFALFLLIYLLTVLGNVLIILAISSDSHLHSPMYFFLYNLSLSDMGFSSTTIPKMLINMQTHNKSITYAACLTQVSFFTLFGCMDSLLLTVMAYDRWVAICRPLYYQVILNPGLCRRLVLMLFFISYMNSLVHYFIVSQLKFCTNMEIPHFFCDIPELLKLACSDTSINNLFRFLLSIIFGFLPVSGIFYSYYKIISSIIRVPSLLGKYKAFSTCGSHLSVVCLFYGTGLEAYLSSTISRSTRENMLASVIYTMRVPMINPFIYSLRNRAMKKALQKIFS

SEQ ID NO: 158 - protein, 306 aa, Artificial Sequence; identical to SEQ ID NO: 157
  Synthetic

SEQ ID NO: 159 - protein, 312 aa, Artificial Sequence
  Synthetic
MKRGNVSESTEFHLMGLSDNQELQPVLFGVFLTIYLITLFGNLLIILATIFDSNLHTPRYFFISNLSFIDICFTTTTIPKMLVNIQAQVNSISYTGCLTQICFVLAFAGLENEILVMMAYDRFVAICHPLRYTVIMNPKLCGVMVLLSFLLSILDALLHTLMALRLSFCTKLEIPHFFCELAHILKLACSNILINNILVYLVTSLFGILPLSGIIYSYTKIISSVLKIPSAAGKYKVFSTCVSHLVVVILFYGTGFGVYLSSAGTHSSRMSAIASVMYTVVTPTMNPFIYSLRNKDMVNAFKKLISRITTSL

SEQ ID NO: 160 - protein, 316 aa, Artificial Sequence
  Synthetic
IINIMKRGNVSESTEFHLMGLSDNQELQPVLFGVFLTIYLITLFGNLLIILATIFDSNLHTPRYFFISNLSFIDICFTTTTIPKMLVNIQAQVNSISYTGCLTQICFVLAFAGLENEILVMMAYDRFVAICHPLRYTVIMNPKLCGVMVLLSFLLSILDALLHTLMALRLSFCTKLEIPHFFCELAHILKLACSNILINNILVYLVTSLFGILPLSGIIYSYTKIISSVLKIPSAAGKYKVFSTCVSHLVVVILFYGTGFGVYLSSAGTHSSRMSAIASVMYTVVTPTMNPFIYSLRNKDMVNAFKKLISRITTSL

SEQ ID NO: 161 - protein, 312 aa, Artificial Sequence
  Synthetic
MKAGNFSDTPEFFLLGLSGDPELQPILFMLFLSMYLATMLGNLLIILAVNSDSHLHTPMYFLLSILSLVDICFTSTTMPKMLVNIQAQAQSINYTGCLTQICFVLVFVGLENGILVMMAYDRFVAICHPLRYNVIMNPKLCGLLLLLSFIVSVLDALLHTLMVLQLTFCIDLEIPHFFCELAHILKLACSDVLINNILVYLVTSLLGVVPLSGIIFSYTRIVSSVMKIPSAGGKYKAFSICGSHLIVVSLFYGTGFGVYLSSGATHSSRKGAIASVMYTVVTPMLNPLIYSLRNKDMLKALRKLISRIPSFH

SEQ ID NO: 162 - protein, 312 aa, Artificial Sequence
  Synthetic
METVNQTIISEFILLGLSDDPTLQPFIFTLFLTIYLITTLGNLLIILAVSSDSQLHTPMYFFLCNLSFNDICLINTTIPKMLVNIQREDHTITYTACLSQVYLILNFAGIENCLLAVMAYDRYVAICHPLKYTVIMNQYVCAMLLLFSLFLSIVHALFHTLMILLLSFCTEIEIPHFFCELAQIIRLACSDNFINYLLVYTVSVLFFGVPVFGIILSYIHIISSVLKMSSLGGKYKAFSTCGSHLSVVSLFYGTGFGVHISSAFTDSPKKTVVASVMYTIITQMLNPFIYSLRNKEMKKAFRKITSKIPFLL

SEQ ID NO: 163 - protein, 312 aa, Artificial Sequence; identical to SEQ ID NO: 162
  Synthetic

SEQ ID NO: 164 - protein, 311 aa, Artificial Sequence
  Synthetic
MGPRNQTAVSEFLLMKVTEDPELKLIPFSLFLSMYLVTILGNLLILLAVISDSHLHTPMYFLLFNLSFTDICLTTTTVPKILVNIQAQNQSITYTGCLTQICLVLVFAGLESCFLAVMAYDRYVAICHPLRYTVLMNVHFWGLLILLSMFMSTMDALVQSLMVLQLSFCKNVEIPLFFCEVVQVIKLACSDTLINNILIYFASSVFGAIPLSGIIFSYSQIVTSVLRMPSARGKYKAFSTCGCHLSVFSLFYGTAFGVYISSAVAESSRITAVASVMYTVVPQMMNPFIYSLRNKEMKKALRKLIGRLFPF

SEQ ID NO: 165 - protein, 311 aa, Artificial Sequence; identical to SEQ ID NO: 164
  Synthetic

SEQ ID NO: 166 - protein, 316 aa, Artificial Sequence
  Synthetic
MEARNQTAISKFLLLGLIEDPELQPVLFSLFLSMYLVTILGNLLILLAVISDSHLHTPMYFFLSNLSFLDICLSTTTIPKMLVNIQAQNRSITYSGCLTQICFVLFFAGLENCLLAAMAYDRYVAICHPLRYTVIMNPRLCGLLILLSLLTSVVNALLLSLMVLRLSFCTDLEIPLFFCELAQVIQLTCSDTLINNILIYFAACIFGGVPLSGIILSYTQITSCVLRMPSASGKHKAVSTCGSHLSIVLLFYGAGLGVYISSVVTDSPRKTAVASVMYSVFPQMVNPFIYSLRNKDMKGTLRKLWCAICFGFRFLE

SEQ ID NO: 167 - protein, 322 aa, Artificial Sequence
  Synthetic
IINSMEARNQTAISKFLLLGLIEDPELQPVLFSLFLSMYLVTILGNLLILLAVISDSHLHTPMYFFLSNLSFLDICLSTTTIPKMLVNIQAQNRSITYSGCLTQICFVLFFAGLENCLLAAMAYDRYVAICHPLRYTVIMNPRLCGLLILLSLLTSVVNALLLSLMVLRLSFCTDLEIPLFFCELAQVIQLTCSDTLINNILIYFAACIFGGVPLSGIILSYTQITSCVLRMPSASGKHKAVSTCGSHLSIVLLFYGAGLGVYISSAVTDSPRKTAVASVMYSVVPQMVNPFIYSLRNKDMKGTLRKFIGRCAICFGFRFLE

SEQ ID NO: 168 - protein, 305 aa, Artificial Sequence
  Synthetic
MELENQTRVIEFFLLGLSEDPELQPILFGLFLLMYLVTVSGNLLIILAIVSDAHLHTPMYFFLSNLSFTDICFSTTTVPKMLTNLQKQSKSISYTGCITQLSFVLLFAGMENFLLAAMAYDRYVAICNPLRYTDIMKLHLCFVMIFLSLYISIVDALLHGLMTLRLSFCTFLEIPHFFCELYQVIKIACSDTLINNILIYVMSSALGGMPLVGIIFSYYKIISSILRMPSPGGRHKAFSTCGSHLSVVSLFYGTAFGVYISSAFTESYRRTSVASLMYTVFPPMLNPFIYSLRNKDMKKALRKIV

SEQ ID NO: 169 - protein, 305 aa, Artificial Sequence; identical to SEQ ID NO: 168
  Synthetic

SEQ ID NO: 170 - protein, 312 aa, Artificial Sequence
  Synthetic
MESTNQTDAIEFLLLGLSDDPELQPIIFGLFLFMYLVTFLGNLIITLTISAECHLHTPMYFFLSNLSVADICISSTTVPKMLLNIQTPDHRITYSGCLTQACFVLLFAGLENCLLAAMAYDRYVAICHPLRYTVIMNSCFCSILIVVSLAISAVNALLLSLMVLHLNFCTEVEIPHFFCELAQIIKLACSDTLINNILIYISAFMFGGIPFFGIFLSYTEIVSSVLKIPSRQGRHKAFSTCGSHLSVVSLFYGTGLGVYISSAVTESPRKTAVASVMYSIVTQMLNPFIYSLRNRDMKEALRKHVGRIASIV

SEQ ID NO: 171 - protein, 312 aa, Artificial Sequence; identical to SEQ ID NO: 170
  Synthetic

SEQ ID NO: 172 - protein, 315 aa, Artificial Sequence
  Synthetic
MNNMEKRNQTTFPGFLLLGLTEDPKLQPVFVSLFFSIYLITILGNLLIILISISDAHLHTPMYLFLSNLSLNDICLSTSTIPKMLVNIKENSQSITYKGCLTQMSFVLIFCGMENCLLAVMAYDRYIAICHPLRYTVIMEPCFCVLLILLSLLISVVDTLMHSLMVLRLSFCTHLEISNFICELPQILKLACSDTLIDNILIYLSACIFTGIPISGIVFSYVHIISSILRMSSLEGKHKAFTTCGSHLSVVSLFYGTAFGVYITSIIMDSSRNTAVASVMYSVVPQMLNPFIYSLRNRDMKEAMGKFFSRMASFL

SEQ ID NO: 173 - protein, 315 aa, Artificial Sequence
  Synthetic
MNNMEKRNQTAFPGFLLLGLTEDPKLQPVLVSLFFSIYLVTIFGNMLIVLISISDSHLHTPMYLLLSNLSLNDICLSTSTIPKMLVNIQENIQSITYKGCLTQMNFVLIFGGMENCLLAVMAYDRYVAICHPLRYTVIMEPCFCILLILLSLLISIVDSLMHSLMVLRLPFCTHLEIPSFFCELPKMLKLACSDTLIDNILIYISSCIFAGIPLSGIVFSYIHIMSSILRMSSSEGKHKAFTTCGSHLSVVFLFYGTGFGVYITSIIMDSSRKTAVASVMYSVVPQMLNPFIYSLRNRDMKDTMRKFFSRIASVL

SEQ ID NO: 174 - protein, 316 aa, Artificial Sequence
  Synthetic
FTMNMKYINQTVVSGFILLGLTDDTKLQLIIFSVFLSMYLATVIGNLLIILATNFDSHLHTPMYFFLSVLSFNDIFLVTCTIPKMLVNIQTGNQNITYGGCLTQVCFVLVSVGMENCLLAAMAYDRYVAICHPLRYRIIMNPYLCILMVAFSMIGSMANALVNGLMVLHLSFCTELIIPHFFCELTQITKLACSNTLIDNILIYISSCIFGGVPLSGIILSYCQIATTVLRMSSSEGRYKAFSTCGSHLSVVFLFYGTGFGVYISSTITESSRKSAVASVLYSVVPQMINPFIYSLRNRDMKEALKKLISRILFPL

SEQ ID NO: 175 - protein, 312 aa, Artificial Sequence
  Synthetic
MYSINQTVVSGFILLGLTDDTKLQLIIFSVFLSMYLATVIGNLLIILATNFDSHLHTPMYFFLSVLSFNDIFLVTCTIPKMLVNIQTGNQNITYGGCLTQVCFVLVSVGMENCLLAAMAYDRYVAICHPLRYRIIMNPYLCILMVAFSMIGSMANALVNGLMVLHLSFCTELIIPHFFCELTQITKLACSNTLIDNILIYISSCIFGGVPLSGIILSYCQIATTVLRMSSSEGRYKAFSTCGSHLSVVFLFYGTGFGVYISSTITESSRKSAVASVLYSVVPQMINPFIYSLRNRDMKEALKKLISRILFPL

SEQ ID NO: 176 - protein, 312 aa, Artificial Sequence
  Synthetic
MELKNQTAVSEFHLLGLTDNHRMLPLVFIMFLFMYLITVFGNLIIIMAISSGSQLHTPMYLFLSILSINDICYSTVTIPKMLVNIQAHDDSISYIECLSQICFVSIFGGMENFLLAVMAYDRYVAICKPLRYTVIMNPICCVLMVLFSLFFSIMDALLHSLMVLRLSFCTDLEIPHFFCELAQIIKLACSDTFLNNFLIFVAAFVFGGGPVCGIIFSYIYIVSSVLRMPSSGGKHRAFSTCASHLSVVSLFYGTGFGVYISSAVTDSLRNTAMASMMYSVVPPLLNPFIYSLRNREMKEALRKLVGRLIYLI

SEQ ID NO: 177 - protein, 312 aa, Artificial Sequence
  Synthetic
MEPQNKTFVLQFLLLGFTDDAELQCLIFSLFLFIYLVTILGNLLIILCISSESHLQTPMYFFLSNLSFNDIGLSTATVIKMLVNIQANDQSITYTDCLTQLFFVLAFAYFENFLLTVMAYDRYAAICHPLRYNIIMNPNLCVLLSLNSLFISVMDSLIHTLMVQRLSFCTDLEIPHFFCELDQVIKLSCSDTRIDNIVLFVATCVFGGVPLCGIIYSYYHIMSTILKITSLEGKYKAFSTCGTHLSVVSLFYGAGSMVYISSAISASPGKSAVASVMYSVLPQMMNPFIYSLRNKDMKVAIRNLFSRTISLE

SEQ ID NO: 178 - protein, 312 aa, Artificial Sequence
  Synthetic
MEPQNKTFVLQFLLLGFTDDAELQCLIFSLFLFIYLVTILGNLLIILCISSESHLQTPMYFFLSNLSFNDIGLSTATVIKMLVNIQANDQSITYTDCLTQLFFVLAFAYFENFLLTVMAYDRYAAICHPLRYNIIMNPNLCVLLSLNSLFISVMDSLIHTLMVQRLSFCTDLEIPHFFCELDQVIKLSCSDTRIDNIVLFVATCVFGGVPLCGIIYSYYHIMSTILKIASLEGKYKAFSTCGTHLSVVSLFYGAGSMVYISSAISASPGKSAVASVMYSVLPQMMNPFIYSLRNKDMKVAIRNLFSRTISLE

SEQ ID NO: 179 - protein, 312 aa, Artificial Sequence
  Synthetic
MESKNQTDVSEFFLMGITDDIALKPLIFSMFTSMYLITILGNLLIILTVCSDSHLQTPMYIFLSNLSFNDICLSTTIIPKTLVNIHAQDQSITYTSCLTQICFTLLFCSFESCLLSVMAYDRYVAICHPLNYTTIMNPQTCGLLILLSLIISLVNSGLLGLMVLRLSFCTNLEIPLFFCELAQVIKLACSDTLVNYILIYLATIILNGIPISGIIFSYTQIASSVLRMSSVKGKYKAISTCGSHLSVVSLFYGTALGVYISSSFTTSVTNTAFAYVMCTLVPQMLNPFIYSLRNRDMEVALRKHINRAMCLL

SEQ ID NO: 180 - protein, 312 aa, Artificial Sequence; identical to SEQ ID NO: 179
  Synthetic

SEQ ID NO: 181 - protein, 311 aa, Artificial Sequence
  Synthetic
MGGKNQTDVSHFFLLGLTDDPTVKPVIFCIFLLMYMVTILGNLLIILAVCSYSHLQTPMYFFISNLSINDICLSTTVIPNMLRTTQTQDQSISYAGCLTQLCFVLLFAGFESCLLAAMAYDRYVAICYPLSYTVMMNFHSCALLILFSVLISVLNMGLLGLMVLRLSFCTNLEIPLFFCELSQVMKLACSDTLINDILIYLATFIFGGIPISGIIFSYVQIASSVLRISSVKGRCKAFSTCGSHLSVTSLSYGSGLWVYITSSVAILPKKTSVACIMYTVVPQMLNPFIFSLRNKDMKGTMKKFISKVASL

SEQ ID NO: 182 - protein, 312 aa, Artificial Sequence
  Synthetic
MEPGNQTGTSYFILMRLNYDPTVEPLIFGFFMFTYLVTIVGNLLIIIAVSSDSHLQTPMYLFLSKLSFTDICLSTTTVPNMLKNIHTQDHSISYTGCLTQACFVLSFAVLESSVLAAMAYDRYAAICHPLNYTVIMNPQFCGLLILLSLIISTANSLLQCLMILRLSFCTNNELPLFFCELAQVIKLACSDTLINYILIYLATFIFGGIPISGIIFSYTRIVSSILKISSLRGRYKAFSTCGSHFVVVSLFYGAAVGVYICSAITVSPQITTVSYMMYTVLPQMLNPFIYSLRNRDMKKALGKLITKVSCFL

SEQ ID NO: 183 - protein, 312 aa, Artificial Sequence
  Synthetic
MEPGNQTGAYYFYLTELTSDPTMELLIFSLFLFIYLVTILGNLLIIIAVSSDSHLQTPMYHFLSKLSFADICLSTTTIPNMLKNIHTQDQSISYTGCLIQACFVLNFALVESCILAAMAYDRYAAICHPLNYTVIMNPHFCDLLILLSLIISIVNSLLQCLMILRLSFCTNNELPLFFCELAQVIKLACSDTLINYILIYLATFIFGGIPIFGIIFSYTRIVSSILKISSLRGKYKAFSTCGSHLSVVSLFYGAGVGVYISSSIAVFPQTTTVSYIMYTVLPQMLNPFIYSLRNKDMKEALRKLIAKESRLP

SEQ ID NO: 184 - protein, 312 aa, Artificial Sequence
  Synthetic
MESANQTGISEFFLIGLIYVPELQPLFFDLFLSMYLITIIGNLLIILAVSKDSRLHTPMYFFLCNLSFTDICTSTTTVPKLLLNIQVHDQSITYIGCLSQVCFILTFCVLERCLLTVMAYDRYVAICQPLRYTIIMNPFLCICLVLLSLIISTINALLHTLLVLPLSFCTEQNVPNFFCELGQITKLSCSDTFINILFIYTATIVFSVIPLSGIIFSYIQIVSSILKIPSVGGRHKAFSTCGSHLSVVSLFYGTGLGVYMNASVSNSSISNVITSMMYSVVPQMLNPFIYSLRSKEIKGSLRQLIIGIICFP

SEQ ID NO: 185 - protein, 312 aa, Artificial Sequence
  Synthetic
MESANQTGISEFFLIGLIYVPELQPLFFDLFLSMYLITIIGNLLIILAVSKDSRLHTPMYFFLCNLSFTDICTSTTTVPKLLLNIQVHDQSITYIGCLSQVCFILTFCVLESCLLTVMAYDRYVAICQPLRYTIIMNPFLCICLVLLSLIISTINALLHTLLVLPLSFCTEQNVPNFFCELGQITKLSCSDTFINILFIYTATIVFSVIPLSGIIFSYIQIVSSILKIPSVGGRHKAFSTCGSHLSVVSLFYGTGLGVYMNASVSNSSISNVITSMMYSVVPQMLNPFIYSLRSKEIKGSLRQLIIGIICFP

SEQ ID NO: 186 - protein, 313 aa, Artificial Sequence
  Synthetic
MEISNQSGISEFFLTGLTYSPAIESFIFSLFLSIYFVTIFGNILIILAVRLDYHLHTPMYFFIANLSFTDICISTTIIPKMLLNIETQNQSITYTGCLSQVCFVLIFGGLESCLLAVMAYDRYLAIVHPLRYTVIMNPCLCVLLVLLSLFISTINALLHSLMLLKLSFCKDQNILHFFCELVQVIKHACSDTFINTLLIYTVTSVFAGFPLAGIIFSYIQIVSSILKISSVQGRNKAFSTCGSHLSVVSLFYGTAFGVYMSSAVSDSSVKNIVFSMMYTVVPQMLNPFIYSLRNREMKQAMRHLLFPVVLSSP

SEQ ID NO: 187 - protein, 312 aa, Artificial Sequence
  Synthetic
MEVKNKSVVLDIFLHGLTDDIELQPFIFGFFLCMYLITIFGNLLIMLAIICDSHLHKPMYFFLCHLAFNDMYLISITVPKLLVNVQTQDQRITLAGCLSQGCFVAVCFIFECFLLGIMAYDRYIAICFPLRYTVLINPFFCVIVVLISLFISIVNGLLHSLMVLHLSFCTDLEILHFFCEIAQILKLACSDNLINNILIFVTASSFAGVPLCGIIFSYVHIVSTVLKMPSSEGKYKAFSTCGSHLSVVSLFYGTGFGVYITSVVIDSPKEIAIASVMYSIVPPMLNPFVYSLKNRDMKEALKKVIGRTVSLP

SEQ ID NO: 188 - protein, 317 aa, Artificial Sequence
  Synthetic
MCKMEVENKSVVFDIFLHGLTDDTELQPFIFGLFLCMYLITIFGNLLIILAIICDSHLHTPMYFFLCHLAFNDMYLISITVPKMLVNIQTQDQRITFAGCLSQGCFVAVCTIFECFLLGIMAYDRFIAICYPLRYTVLMNPCFCVILTLISLFFSIVNGLLHSLMVLHLSFCTDLEILHFFCEIAQILKLACSDSLINNILIFVTSSIFAGVPLCGIIFSYVHIVSTVLKMPSLEGKYKAFSTCGSHLSVVSLFYGTGFGVYISSNVIDSPKKIAMASVMYSIVPPMMNPFIYSMRNRNMKEALKKVIGRKLLFSDV

SEQ ID NO: 189 - protein, 315 aa, Artificial Sequence
  Synthetic
MSNMEVENKSVVLDIFLHGLTNDPELQPFIFVLFLSIYLITVSGNLLIMLAIKCDFHLHNPMYFFLCHLSFNDMYLISITVPKMLMNIQTKDQRITFAGCLSQACFVVVCTIFECFLLGVMAYDRYIAICYPLRYTVLMNPSFCVILVLFSLFFSIVNGLLHSLMVLYLSFCTDLEILHFFCEIAQILKLACSDSLINNILIFVTASIFAGLPLFAIIFSYTHIVSTVLKMPSSEGKYKAFSTCGSHLSVVSLFYGTGFGVYITSKVIDSPKKIAVASVMYSVVPPMLNPFVYCLRNRDMKEALKKVIGRTASLL

SEQ ID NO: 190 - protein, 315 aa, Artificial Sequence; identical to SEQ ID NO: 189
  Synthetic

SEQ ID NO: 191 - protein, 304 aa, Artificial Sequence
  Synthetic
NCSQAPTLILLGLSSDAEKWQPLFSIFLVIYLLGLLGNLLLLLAIGTDVHLHTPMYFFLSQLSFVDLCFITTTAPKMLEALWTGDGSISFSGCLTQLYFFAVFADMDNLLLAVMAIDRYAAICHPLRYSALMTPFRCGVLVSGSWGVTNCVSLTHTLLLSKLYFHTNQEIPHFFCEFGPLLLLSCSDTHLNKILVIILVGILGISAVLCIVSSYGCIFYAVAKVPSAQGKRKALSTCSSHLSVVLLFYSTVFATYLKPPSSSRSSEEVVAAVMYSLVTPTLNPFIYSLRNKDVKSSLRRILNME

SEQ ID NO: 192 - protein, 304 aa, Artificial Sequence; identical to SEQ ID NO: 191
  Synthetic

SEQ ID NO: 193 - protein, 316 aa, Artificial Sequence
  Synthetic
SSIISPRMNCSQAPGFILLGLPREPEKWQHFFIIFLGLYLLGLLGNLLLLLAIGSDVHLHTPMYFFLSQLSLVDLCFITTTAPKTLETWWTGDGSISFSGCLTQLYFFGVFADMDNLLLAVMAIDRYAAICHPLLYPLLMTPCRCEVLVSGSWGIAHCVSLMYTLLLSQLYFHTNQEIPHFFCDCRPLLLLSCSDTHLNEVLMMALAGVLGVSAVLCIVSSYGCIFYAVARVPSAQGKRKALTTCSSHLSVVLLFYSTVFATYLKPPSTSHSSGEVVAAVMYTLVTPTLNPFIYSLRNKDVKSSLRRVLNIEKSQD

SEQ ID NO: 194 - protein, 308 aa, Artificial Sequence
  Synthetic
NCSKTPGFILLGLSSDPEKWQPLFNIFLCLYLLGLLGNLLLLLAIGTDVHLHTPMYFFLSQLSLVDLCFITTTAPKMLEALWTGDGSISFSGCLTQFYFFAVFADMDNLLLAVMAIDRYAAICHPLFYPFLMTPCRCEVLASGSWGIAHCVSLFYTLLLSQFYYHTNQGIPHFFCDSRPLLLLSCSDTHLSEGLMMALSGVLGMSSVLCLVSSYGCIFYAVARVPSAQGKRKALATCSSHLSVVLLFYSTVFATYLKPPSTSHSSAEVVAAVMYTLVTPTLNPFIYSLRNKDVKSSLRKILNMDKFQG

SEQ ID NO: 195 - protein, 308 aa, Artificial Sequence
  Synthetic
MDNSSWTSVSHFVLLGISTNPVEQIPLFLLFLLMYIINISGNFFIVTLIISTSHLHTPMYIFLSNLALADICFTSTTVPKMLQNIFSSTKVISYVGCLAQTYFFICFAAMENFLLAVMAYDRYIAICHPLRYSSILTGMLCAQMVALCHVLSHLHALLHTFLMGRLIFCADNRIPHFFCDLYPLMKISCSSTQLNTLMIHTEGVIVINGALAFIIASYAFIISAVLRIPSANGKWRSFSTCGSHLTVVAIFYGTLTWVYFRPLSSYSVVKGRIVTVMYTVVTPMLNPFIYSLRNGDVKEAFRKWVRRV

SEQ ID NO: 196 - protein, 314 aa, Artificial Sequence
  Synthetic
MDNSNWTSVSHFVLLGISTHPEEQIPLFLVFSLMYAINISGNLAIITLILSAPRLHIPMYIFLSNLALTDICFTSTTVPKMLQIIFSPTKVISYTGCLAQTYFFICFAVMENFILAVMAYDRYIAICHPFHYTMILTRMLCVKMVVMCHALSHLHAMLHTFLIGQLIFCADNRIPHFFCDLYALMKISCTSTYLNTLMIHTEGAVVISGALAFITASYACIILVVLRIPSAKGRWKTFSTCGSHLTVVAIFYGTLSWVYFRPLSSYSVTKGRIITVVYTVVTPMLNPFIYSLRNGDVKGGFMKWMSRMQTFFFR

SEQ ID NO: 197 - protein, 314 aa, Artificial Sequence
  Synthetic
MDNSNWTSVSHFVLLGISTHPEERIPLFLVFSLMYAINISGNLAIITLILSAPRLHIPMYIFLSNLALTDICFTSTTVPKMLQIIFSPTKVISYTGCLAQTYFFICFAVMENFILAVMAYDRYIAICHPFHYTMILTRMLCVKMVVMCHALSHLHAMLHTFLMGQLIFCADNRIPHFFCDLYALMKISCTSTYLNTLMIHTEGAVVISGALAFITASYACIILVVLRIPSAKGRWKTFSTCGSHLTVVAIFYGTLSWVYFRPLSSYSVTKGRIITVVYTVVTPMLNPFIYSLRNGDVKGGFMKWMSRMQTFFFR

SEQ ID NO: 198 - protein, 315 aa, Artificial Sequence
  Synthetic
MRNFSVVSEFILLGLSDDAQVQALLFVAFLVIYVLTLTGNTMILLVIRVDAHLRSPMYFFLGHLSFLDLLYSSVSTPKMLENLVSETKTIPVKGCLAQAFFVFAIGGTEALLLAVMAYDRYAAICHPLLYGQMMNDWFCQVLVWGSWILAILNSLINTLLAVSLDFCHYGTIHNYNCEFPSLFPLSCSDVSTNATAIVCTFVIHASGTFLLVVCSYGCIFSTILNMSSTRGRSKAFSTCSSHLTIVTLYFGSACLRYVMPTSGSPMETFFSLQYSVITPMLNPFVYSLKNKEVKMAMRKLLARQHFGEVDQRHRV

SEQ ID NO: 199 - protein, 308 aa, Artificial Sequence
  Synthetic
MAWSNHSVITEFVLTGLSDDPLIPALLFALFLGIYVLTMTGNLTMLLVITADSHLHTPMYFFLSNLSFVDLCFSSVTIPKLLKDLLSAKKTISIEGCLAQVFFVFFSSGTEACLLSVMAYDRYAAICHPLLYGQVMRNELCVRLVVISWGVASLNATIIVLLAVNLDFCGAQTIHHYTCELPALFPLSCSDISITVVVLLCSSLLHGLGTFIPIFFSYARIVSAILSISSTTGRSKAFSTCSSHLAAVTLFFGSGFLCYLMPPSGSSLDLLLSLQYSAVTPMLNPLIYSLKNQEVKAAVQRTLRKYLL

SEQ ID NO: 200 - protein, 311 aa, Artificial Sequence
  Synthetic
MAWSNHSVITEFVLTGLSDDPLIQALLFALFLGIYVLTMTGNLTMLLVITADSHLHTPMYFFLSNLSFLDLCFSSVTVPKLLKDLLSAKKTISVEGCLAQVFFVFITAGTEAFLLSMMAYDRYAAVCHPLLYGQMMSNELCLKLVLLSWGLASLSSVVIVLLAVNLDFCEAYTIHHYTCELPSLFPLSCSDISINVDILICSTLLHGLGTFLPIFFSYARIVSTVLSMESTTGRSKAFNTCSSHLIAVVLFFGSGLIRYLMPTSGSSLDLLSSLQYSAVTPMLNPLIYSLKNQEVKAAVRRTLGKCLRYLE

SEQ ID NO: 201 - protein, 312 aa, Artificial Sequence [sequence omitted]

SEQ ID NO: 202 - protein, 312 aa, Artificial Sequence
  Synthetic
MALGNHSTITEFLLLGLSADPNIRALLFVLFLGIYLLTIMENLMLLLMIRADSCLHKPMYFFLSHLSFVDLCFSSVIVPKMLENLLSQRKTISVEGCLAQVFFVFVTAGTEACLLSGMAYDRHAAICRPLLYGQIMGKQLYMHLVWGSWGLGFLDALINVLLAVNMVFCEAKIIHHYSYEMPSLLPLSCSDISRSLIALLCSTLLHGLGNFLLVFLSYTRIISTILSISSTSGRSKAFSTCSAHLTAVTLYYGSGLLRHLMPNSGSPIELIFSVQYTVVTPMLNSLIYSLKNKEVKVALKRTLEKYLQYTRR

SEQ ID NO: 203 - protein, 309 aa, Artificial Sequence
  Synthetic
MRNHSTVPEFILLGLSADAQVQALLFVLFLVIYLLTLMGNLMLLLVVKVDRHLHTPMYFFLGQLSFLDLCHSSVSVPKLLENLLSVKKTISVEGCLAQVFFVFATGGTESCLLAVMAYDRYVAISSPLLYGQVMSRQLCAGLVWGSWSLAFLDAFINILVALNLDFCEAQNIHHFICELPSLYPLSCSDVSASFTTLLCSSFIHFFGNFLLILLSYIRILLTILGISSASGRSKAFSTCSSHLTAVSFFYGSGLLRYLMPNSGSTQELIFSLQYSVITPMLNPLIYSLKNKEVKAAVRRTVTKYLQCFK

SEQ ID NO: 204 - protein, 309 aa, Artificial Sequence; identical to SEQ ID NO: 203
  Synthetic

SEQ ID NO: 205 - protein, 305 aa, Artificial Sequence
  Synthetic
MRNHSAVHEFVLLGLSTDPHIQPALFVLFLLVYLLTVVGNSLMLLVIVADSHLHTPMYFFLRQLSFLDLCHSSVTAPKMLENLLSEEKTILVESCLAQAFFVFATGGTEACLLAAMAYDRYVAIGSPLLYSQVMSSQLCVGLVWLSWCLAVVDALLNTLPAVSLDFCEDQTISHFSCELSSLFPLSCSDTAANFTLLLCSSVVHFFGTLVMIVCSYGRIVTTVLRVSSSTGRSKAFSTCLSHLTTVILFYGSGFISYLLPASGSPLEKVFSLQYSVITPMLNPLIYSLKNKEVKAALGRMIRKHF

SEQ ID NO: 206 - protein, 315 aa, Artificial Sequence
  Synthetic
MEAMIKGKNITEITEFILLGFSDFPQITALLFVIFLTLYITALTWNLSLVVLIRMDSYLHTPMYFFLSNLSFIDICYISSTVPKMLFNFFQKRQTISFVGCIVQYFMFSTMGLSESCLMTAMAYDRYAAICNPLLYSSVMSPTLCAQMVMGSYTAGFIGSVSQVFAMLQLHFCGPNVIRHFFCDIPQLLNLSCTDTFFAHVELLILTMLFCISNALVIIISYGYIVLSILKITSAKGRSKAFNTCASHLTAVSLFYTSTAFVYFSSSSGGSSSFDRFVSVFYTVLITMLNPLVYSLRNKEIKDAGKRLQKKLGCC

SEQ ID NO: 207 - protein, 312 aa, Artificial Sequence
  Synthetic
MIGGRNITKITQFILLGFSDFPQITALLFVMFLTLYITALTWNLSLVVLIRMDSYLHTPMYFFLSNLSFIDFCYISSTVPKMLSNLFQEKQTISFVGCIVQYFIFSTMGLSESCLMTAMAYDRYAAICNPLLYSSVMSPTLCAQMVMGSYTAGLVSSLSQICVLLQLHFCGSNVIRHFFCDMPQLLNLSCNDTFFAHVLLVILTMFFGLINALAIMVSYGYIASSIMKITSANGRSKAFNTCASHLTAVSLFYSSGIFVYLSSSSGGSSSFDRFASVFYSVVIPMLNPLIYSLRNKEIKDAMNRLQKKVICS

SEQ ID NO: 208 - protein, 312 aa, Artificial Sequence
  Synthetic
MIGERNITKITQFILLGFSDFPRITVPLFVMFLMIYTLAVTWNFSLIALIRLDSHLHTPMYFFLSNLSIIDICYITSTAPKMLSNFFQENQTISFVGCIVQYFILSTMGLTESCLMTAMAYDRYAAICNPLLYSSVMSPTLCAQMVMGSYTAGLTGSVSQICALLQLYFCGPNVIRHFFCDISQLLNLSCSDAFFVQVLLAILTMCFGIANALATMLSYGFIVLSILKITSAKGRSKAFNTCASHLTAVSLFYSTAIFVYLRSSSGGSSSFDRFASVFYTVVIPMLNPLIYSLRNKEIKDAMKRLQKKKICS

SEQ ID NO: 209 - protein, 312 aa, Artificial Sequence
  Synthetic
MIGERNITTITQFILLGFSDFPRITVLLFVIFLMIYIMTMTWNLSLIALIRMDSHLHTPMYFFLSNLSFIDLCFVTSTAPKMLSNFFQENQTISFVGCIVQYFILSTMGLTECCLMTAMAYDRYAAICNPLLYSSVMSPTLCAQMVMGSYTAGLTGSVSQICALLQLYFCGPNVIRHFFCDISQLLNLSCSDAFFVQVLLAILTMCFGIANALATMLSYGFIVLSILKITSAKGRSKAFNTCASHLTAVSLFYSTGIFVYLRSSSGSSSSFDRFTSVFYTVVIPMLNPLIYSLRNKEIKDAMKRLQKKKICN

SEQ ID NO: 210 - protein, 312 aa, Artificial Sequence
  Synthetic
MIARGNSTEITQFILLGFTDLPIIIILLFVTFLLIYITTLTWNLSLIVLIRMDSHLHTPMYFFLCNLSIIDLCYVTSTVPKMLSNFFQERQTNSFVGCIVQNFIFSTMGLSESCLMAAMAYDRYAAICNPLLYASIMSPTLCVLMVLASYLSGLTASLLQLFALLRLHFCGTNVIKHFFCDMPQLLVLSCTDTFFVQVLTAILTMIFGFVNMLVIMISYVYIVLSILKITSAKGRSKAFNTCASHLTAVSLFYTSSIFVYLSSSSGGSSSFDRFVSVFYTVVIPMLNPLIYSLKNREIKDAMKRLQKKTICN

SEQ ID NO: 211 - protein, 311 aa, Artificial Sequence
  Synthetic
MTGGGNITEITYFILLGFSDFPRIIKVLFTIFLVIYITSLAWNLSLIVLIRMDSHLHTPMYFFLSNLSFIDVCYISSTVPKMLSNLLQEQQTITFVGCIIQYFIFSTMGLSESCLMTAMAYDRYAAICNPLLYSSIMSPTLCVWMVLGAYMTGLTASLFQIGALLQLHFCGSNVIRHFFCDMPQLLILSCTDTFFVQVMTAILTMFFGIASALVIMISYGYIGISIMKITSAKGRSKAFNTCASHLTAVSLFYTSGIFVYLSSSSGGSSSFDRFASVFYTVVIPMLNPLIYSLRNKEIKDALKRLQKRKCC

SEQ ID NO: 212 - protein, 311 aa, Artificial Sequence; identical to SEQ ID NO: 211
  Synthetic

SEQ ID NO: 213 - protein, 313 aa, Artificial Sequence
  Synthetic
MPGGRNSTVITKFILVGFSDFPKLKLVLFVIFLGSYLSTVVWNLGLIILIRIDPYLHTPMYFFLSNLSFLDFCYISSTTPKMLSGFFQKSKSISFVGCTMQYFIFSSLGLSECCLLAAMAYDRYAAICNPLLYTAIMSPSLCVHMVVGAYSTGLLGSLIQLCAILQLHFCGPNIINHFFCDLPQLLVLSCSETFPLQVLKFVIAVIFGVASVIVILISYGYIIGTILNISSVEGRSKAFNTCASHLTAVTLFFGSGLFVYMRPSSNSSQGYDKMASVFYTVVIPMLNPLIYSLRNKEIKDALQRCKNKSQCHC

SEQ ID NO: 214 - protein, 313 aa, Artificial Sequence; identical to SEQ ID NO: 213
  Synthetic

SEQ ID NO: 215 - protein, 315 aa, Artificial Sequence
  Synthetic
MSITKAWNSSSVTMFILLGFTDHPELQALLFVTFLGIYLTTLAWNLALIFLIRGDTHLHTPMYFFLSNLSFIDICYSSAVAPNMLTDFFWEQKTISFVGCAAQFFFFVGMGLSECLLLTAMAYDRYAAISSPLLYPTIMTQGLCTRMVVGAYVGGFLSSLIQASSIFRLHFCGPNIINHFFCDLPPVLALSCSDTFLSQVVNFLVVVTVGGTSFLQLLISYGYIVSAVLKIPSAEGRWKACNTCASHLMVVTLLFGTALFVYLRPSSSYLLGRDKVVSVFYSLVIPMLNPLIYSLRNKEIKDALWKVLERKKVFS

SEQ ID NO: 216 - protein, 309 aa, Artificial Sequence
  Synthetic
MSITKAWNSSSVTMFILLGFTDHPELQALLFVTFLGIYLTTLAWNLALIFLVRGDTHLHTPMYFFLSNLSFIDICYSSAVAPNMLTDFFWEQKTISFVGCAAQFFFFVGMGLSECLLLTAMAYDRYAAISSPLLYPTIMTQGLCTRMVVGAYVGGFLSSLIQASSIFRLHFCGPNIINHFFCDLPPVLALSCSDTFLSQVVNFLVVVTVGGTSFLQLLISYGYIVSAVLKIPSAEGRWKACNTCASHLMVVTLLFGTALFVYLRPSSSYLLGRDKVVSVFYSLVIPMLNPLIYSLRNKEIKDALWKVLE

SEQ ID NO: 217 - protein, 317 aa, Artificial Sequence
  Synthetic
MALTNTWNSSSVTMFIFLGFSDHPELRIFLFLTFLSIYLVTLTWNLALIFLIRGDIHLHTPMYFFLSNLSFVDICYSSSVAPKMLSDFFREQKTISFLGCGAQFFFFVGLGLTECFLLTAMAYDRYAAISNPLLYTTIMPQGLCMRMVAGAYLGGFLSSFIQASSIFQLHFCGPNVINHFFCDLPPILALSCSNTFLSQVVNFLIVITVGGTSFLILLISYSYIVSAVLKIHSVRGRWKAFNTCASHLMAVTMLFGTALFMYLRPSSSYSFSRDKVVSVFYSLVIPMLNPLIYSLRNKEIKDALWKVMERKKVFPNL

SEQ ID NO: 218 - protein, 320 aa, Artificial Sequence
  Synthetic
MAVGRNNTIVTKFILLGLSDHPQMKIFLFMLFLGLYLLTLAWNLSLIALIKMDSHLHMPMYFFLSNLSFLDICYVSSTAPKMLSDIITEQKTISFVGCATQYFVFCGMGLTECFLLAAMAYDRYAAICNPLLYTVLISHTLCLKMVVGAYVGGFLSSFIETYSVYQHDFCGPYMINHFFCDLPPVLALSCSDTFTSEVVTFIVSVVVGIVSVLVVLISYGYIVAAVVKISSATGRTKAFSTCASHLTAVTLFYGSGFFMYMRPSSSYSLNRDKVVSIFYALVIPVVNPIIYSFRNKEIKNAMRKAMERGISHGGPFIFMT

SEQ ID NO: 219 - protein, 320 aa, Artificial Sequence; identical to SEQ ID NO: 218
  Synthetic

SEQ ID NO: 220 - protein, 319 aa, Artificial Sequence
  Synthetic
MAGGRNSTVVTRFILLGFSDQPQMKIFLFMLFLGIYILTLAWNLSLITLIRMDSHLHTPMYFFLSNLSFLDICYSSSTAPKMLSDIVTDKNTISFLGCATQYFVFCGMGLTECLLLAAMAYDRYTAVCNPLLYMALMSHTLCLKLVAGAYMGGFLSSLIATCSIYQHDFCGPNIINHFFCDLPPVLALACSDIFTSQVVTFILGVIVGVMSVLVVLISYGYIIAAVLRINSAKGRTKAFSTSASHLTAVTLFYGSGLFMYMRPNSSYSLGQDKVASVFYAVVVPMMNPIIYSLRNKDIKNAVRKAVERDSMLSHGYSFF

SEQ ID NO: 221 - protein, 318 aa, Artificial Sequence
  Synthetic
MAVGRNISVVTNFILLGFLERPQLQIVLFVLFLGIYLVTLAGNLGLIVLIRMDSHLHSPMYFFLSNLSFVDVSYTSSIAPKMLCDFFREQKSITFIGCAIQLFFFVGMGGTECCLLAAMAYDRYVAISNPLLYPSLMSPTICVGMAITVYTGGFLTGLIQTSSIFRLHFCGPRVINHFFCDLPPLMSLSCSSTFFSQVVNFLVVCVVGGASALVVLVSYGYIIAAVMRIHSTHGQMKAFNTCASYLTTVILFYGSGLFSYLHSNAGYSQDKNKVVSMFYGAVIPMLNPIIYSLRNKEIKEALKKLKKRKKQMSCLCAM

SEQ ID NO: 222 - protein, 319 aa, Artificial Sequence
  Synthetic
SISVLGDGNHTSVAMFVLLGLLDQAELQLILFPVFLGTYLITLIWNLGLIILIRMDSHLQTPMYFFLSFLSFIDICYSSSISPRMLSDFLKTEKTISFIACATQNFVLDWMGTSECCLLAAMAYDRYVAIGSPLQYSAIMAPSLCWRMVAGVYGSGFFISFVHTVACFNLYYCGPNVIRHFFCDIPQIIPLSCSDPFISQLVLFLAALFVGFGSFLVILLSYVFIAVSILKVASFKGRVKAFKTCGSHLAAVTLFYGTVFSVYMHHSSQHSTKQDKVLSVVYTILIPMVNPLIYSLRNTEIKEALKRVLKKAAHLPQKA

SEQ ID NO: 223 - protein, 323 aa, Artificial Sequence
  Synthetic
SRSVLGDGNHTSVAMFVLLGLLDQAELQLILFPVFLGTYLITLIWNLGLIILIRMDSHLQTPMYFFLSFLSFIDICYSSSISPRILSDFLKTEKTISFIACATQNFVLAWMGASECCLLTAMAYDRYVAIGSPLQYSAIMAPSLCWRMVAGVYGSGFFISFVQTVACFNLYYCGPNVIRHFFCDIPQIIPLSCSDPFISQLVLFLAALFVGFGSFLVIIFSYVFIAVSILKVASFEGCVKAFKTCGSHLAAVTLFYGTVFSVYMHHSSQHSTKQDKVLSVVYTILIPMVNPLIYSLRNTEIKEALKRVLKKHLPQKHSIWAGS

SEQ ID NO: 224 - protein, 311 aa, Artificial Sequence
  Synthetic
MERGNHTVTGFILLGFSTDPVMQKILFVMFLGVYSLTLLGNTTLIILICNDSRLHTPMYFFIGNLSFLDLWYSSVYTPKILVTCISEDKSISFAGCLSQFFFSAGLAYSECYLLAAMAYDRYTAISNPLLYAQAMSRRLCVCLVVYSYTGGFVNAIILTSNTFTLDFCGDNVIDDFFCDVPPLVKLACDVRESYQSVLYFLLASNVISPTLLILTSYLFIIAAILRIRSTQGRLKAFSTCSSHLISVTLYYGSILYIYSRPSSSYSLERDKMVSTFYTVLFPMLNPMIYSLRNKDVKEALRKLFKLAPSEV

SEQ ID NO: 225 - protein, 305 aa, Artificial Sequence
  Synthetic
MQRSNHTVTEFILLGFTTDPGMQLGLFVVFLGVYCLTVVGSSTLIVLICNDSRLHTPMYFVIGNLSFLDLWYSSVHTPKILVTCISEDKSISFAGCLCQFFSARLAYSECYLLAAMAYDHYVAISKPLLYAQTMPRRLCICLVLYSYTGGFVNAIILTSNTFTLDFCGDNVIDDFFCDVPPLVKLACSVRESYQAVLHFLLASNVISPTVLILASYLSIITTILRIHSTQGRIKVFSTCSSHLISVTLYYGSILYNYSRPSSSYSLKRDKMVSTFYTMLFPMLNPMIYSLRNKDMKDALKKFFKS

SEQ ID NO: 226 - protein, 305 aa, Artificial Sequence
  Synthetic
MQRSNHTVTEFILLGFTTDPGMQLGLFVVFLGVYSLTVVGNSTLIVLICNDSCLHTPMYFFTGNLSFLDLWYSSVYTPKILVTCISEDKSISFAGCLCQFFFSAGLAYSECYLLAAVAYDRYVAISKPLLYAQAMSIKLCALLVAVSYCGGFINSSIITKKTFSFNFCRENIIDDFFCDLLPLVELACGEKGGYKIMMYFLLASNVICPAVLILASYLFIITSVLRISSSKGYLKAFSTCSSHLTSVTLYYGSILYIYALPRSSYSFDMDKIVSTFYTVVFPMLNLMIYSLRNKDVKEALKKLLP

SEQ ID NO: 227 - protein, 305 aa, Artificial Sequence
  Synthetic
MQRSNHTVTEFILLGFTTDPGMQLGLFVVFLGVYSLTVVGNSTLIVLICNDSHLHTPMYFVVGNLSFLDLWYSSVYTPKILVICISEDKSISFAGCLCQFFFSAGLAYSECCLLAAMAYDRYVAISKPLLYAQAMSIKLCALLVAVSYCGGFINSSIITKKTFSFNFCCENIIDDFFCDLLPLVKLACGEKGGYKFLMYFLLASNVICPAVLILASYLFIITSVLRISSSQGRLKAFSTCSSHLTSVTLYYGSILYIYALPRSSYSFDMDKIVSTFYTEVLPMLNPMIYSLRNKDVKEALKKLLP

SEQ ID NO: 228 - protein, 305 aa, Artificial Sequence
  Synthetic
MDQNNNTVSEFIMLGFTTDPVIQKVLFAVFLVVYTLTLMGNSSLIMLICNDSRLHTPMYFFIGNLSFLDLGLSSVYTPKILETCISEDKSISFAGCVAQFFFSAALDYTECYLLAAMAYDRYVAISKPLLYSQAMSLKLCVCFVAASYVGGFINSVIITKDTFALTFCNDNVIDDFFCDIPPLVKLACGKKKSFQSVLFFLLTSNVIIPIVFILATYLFIIATILRIRSTQGRLKAFSTCSSHLISVTLYYGSILYIYARPRSSYSLDRDKIVSTFYTVVFPMLNPLIYSLRNKDVKEALNKLLK

SEQ ID NO: 229 - protein, 305 aa, Artificial Sequence
  Synthetic
MDQNNNTVSEFIMLGFTTDPVIQKVLFAVFLVVYTLTLMGNSSLIMLICNDSRLHTPMYFFIGNLSFLDLGLSSVYTPKILETCISEDKSISFAGCVAQFFFSAALDYTECYLLAAMAYDRYVAISKPLLYSQAMSLKLCVCFVVASYVGGFINSVIITKDTFALTFCNDNVIDDFFCDIPPLVKLACGKKKSFQSVLFFLLTSNVIIPIVFILATYLFIIATILRIRSTQGRLKAFSTCSSHLISVTLYYGSILYIYARPRSSYSLDRDKIVSTFYTVVFPMLNPLIYSLRNKDVKEALNKLLK

SEQ ID NO: 230 - protein, 305 aa, Artificial Sequence
  Synthetic
MEQYNDTVTEFILVGFTTNPVMQLVLLVIFLAVYALTVLGNSTLIVLICNDSRLHTPMYFFIGNLSFLDLGLSTVYTPKILVTCISEDKSISFSGCVAQFFFSAGLGYTECYLLAAMAYDRYVAISKPLLYSQAMSLKLCAFLVGVSYLGGLINSFIITKDTFALTFCNDNVIDDFFCDIPPLVKLSCGKKKSFQSVLFFLLTSNVIIPIVFILATYLFIIATILRIRSTQGRLKAFSTCSSHLISVTLYYGSILYIYARPRSSYSLDRDKIVSTFYTVVFPMLNPLIYSLRNKDVKEALSKLFK

SEQ ID NO: 231 - protein, 309 aa, Artificial Sequence
  Synthetic
MERGNHTVSEFILLGFTSDPTTQLVLFVMFLIMYTLSVLGNITLIVLICNDSRLHTPMYFFIGNLSFLDLWLSNVYTPKILAICISENKSISFASCVAQFFFSAGLDYSECYLLAAMAYDRYVAISKPLIYSQAISMKLCAFFVAASYMGGFINSSIITKKTFTFDFCNDNVIDDFFCDLLPLVNLACGGKEGYQTLMYFLLTSNVMIPIALILASYIFIIATILRIRSTQGRMKAFSTCSSHLISVTLYYGSILYIYSRPRTRYSLDSDKVVSTFYTVVFPMLNPFIYSLRNKDVKEAMNKLFKIIPL

SEQ ID NO: 232 - protein, 312 aa, Artificial Sequence
  Synthetic
MEVGNCTILTEFILLGFSADSQWQPILFGVFLMLYLITLSGNMTLVILIRTDSHLHTPMYFFIGNLSFLDFWYTSVYTPKILASCVSEDKRISLAGCGAQLFFSCVVAYTECYLLAAMAYDRHAAICNPLLYSGTMSTALCTGLVAGSYIGGFLNAIAHTANTFRLHFCGKNIIDHFFCDAPPLVKMSCTNTRVYEKVLLGVVGFTVLSSILAILISYVNILLAILRIHSASGRHKAFSTCASHLISVMLFYGSLLFMYSRPSSTYSLERDKVAALFYTVINPLLNPLIYSLRNKDIKEAFRKATQTIQPQT

SEQ ID NO: 233 - protein, 316 aa, Artificial Sequence
  Synthetic
TSVDMEVGNCTILTEFILLGFSADSQWQPILFGVFLMLYLITLSGNMTLVILIRTDSHLHTPMYFFIGNLSFLDFWYTSVYTPKILASCVSEDKRISLAGCGAQLFFSCVVAYTECYLLAAMAYDRHAAICNPLLYSGTMSTALCTGLVAGSYIGGFLNAIAHTANTFRLHFCGKNIIDHFFCDAPPLVKMSCTDTRVYEKVLLGVVGFTVLSSILAILISYVNILLAILRIHSASGRHKAFSTCASHLISVMLFYGSLLFMYSRPSSTYSLERDKVAALFYTVINPLLNPLIYSLRNKDIKEAFRKATQTIQPQT

SEQ ID NO: 234 - protein, 316 aa, Artificial Sequence
  Synthetic
SSVDMELDNRTILTEFILVGFSADPHWQLTLFGIFLTIYLLTLSGNMLLVVLIRIDSRLHTPMYFFISNLSFLDFWYTSVYTPKILATCISEDKRISLAGCGAQLFFSCVVAYTECYLLAAMAYDRHSAICSPLIYSSIMSSSLCTGLVAGCYIGGVLNAIAHTANTFRLTFCGKNIIDHFFCDAPPLVKMSCTDTRVYEKVLLGVVGFTVLSSILAILISYFNILLAILRIRSASGRRKAFSTCASHLVSVMLFYGSLLFMYSRPSSTYSLEKDKVAALFYTVVNPLLNPLIYSLRNKDVKDAFRKATQTIRPHT

SEQ ID NO: 235 - protein, 312 aa, Artificial Sequence
  Synthetic
MDVDNRTILTEFILLGFSADPHWQLILFGIFLTIYLMTLLGNMTLIILIRIDSRLHTPMYFFIGGLSFLDFWYNSVYIPKILVNCVSEDKRISLAGCGAQFFFSCVAAYTECYLLAAMAYDRHAAICSPLLYSSIMSTSLCAGLVGASYVGGFLNAIAHTANTFRLRFCGKNIIDHFFCDVLPLVKMSCTDTRVYVKILSSMVGFTVLSSILAILISYLNILLAILRIRSASGRRKAFSTCASHLVSVTLFYGSLLFMYSRPSSNYSLERDKVAAMFYTIINPLLNPFIYSLRNKDVKEAFKKLMQTIKQQT

SEQ ID NO: 236 - protein, 306 aa, Artificial Sequence
  Synthetic
NFTHVSEFILLGFKGGPGIQMLLFLIFLFLYVIAVVGNFGMIIIIRMDAHLHTPMYAFLQSLSFLDICYSSTIAPRALINCMKQDHTISFSGCATQFFFLSLFGTTEAFLLAAMAYDRFIAICNPLLYSVSMSHWVCGLLVSGSYSWGAVNAVTQTTMTFTLTFCGSNEINDFFCDVPPLLSLSCSDTFINQLVLLALCGSIIVSTFLTVFVSYIYIISTILKIRTVQGRQKAFSTCASHLIGVCLFFGTVFFMYAQPSAVSSMEQSKVVSIFYTIVIPMLNPLIYSLRNKDVKQALKRSKQRFCS

SEQ ID NO: 237 - protein, 308 aa, Artificial Sequence
  Synthetic
MTNFTRVSEFILLGFRGGPGIQMLLFLIFLFLYVIAVVGNFGMIIIIRMDAHLHTPMYAFLQSLSFLDICYSSTIAPRALINCLKQDHTISFSGCATQFFFLSLFGTTEAFLLAAMAYDRFIAICNPLLYSVSMSHWVCGLLVSGSYSWGAVNAVTQTTMTFTLTFCGSNEINDFFCDVPPLLSLSCSDTFINQLVLLALCGSIIVSTFLTVFVSYIYIISTILKIRTVQGRQKAFSTCASHLIGVCLFFGTVFFMYAQPSAVSSMEQSKVVSIFYTIVIPMLNPLIYSLRNKDVKQALKRSKQRFCS

SEQ ID NO: 238 - protein, 321 aa, Artificial Sequence
  Synthetic
MAIAVYRNGSAVSLQGFVLVGFGGGAETQALLFAVFLVLYVVTILGNLTMIVVITLDARLHSPMYFFLKNLSFVDLCYSSAIAPNALANFLSTSKVISFEACATQLFFFSLLATTEAFLLAVMAYDRFMAICSPLRYPVTMCPTTCTRLVLGTYCGGCLNSIVQTSLTFQLPFCSSNRIDHFYCDVPPLLQLACASTALNELFLFGLCGFIIVSTTLAVLVSYGYITVTILRMHSGSGRHKVFSTCGSHMMAVSLFYGTVFVMYAQPGAVASMAQGKVISVFYTLVIPMLNPLIYSLRNKDVKDALRRLGQRHSLVKKGGK

SEQ ID NO: 239 - protein, 324 aa, Artificial Sequence
  Synthetic
MATAVHRNGSPVSLRVFVLVGFGGGALTQALLFAVFLVLYVVTVLGNLTMIVVITLDARLHSPMYFFLKNLSFVDLCYSSAIAPNALANFLSTSKVISFEACATQFFFFSLLATTETFLLAVMAYDRFMAICSPLRYPVTMCPTTCTRLVLGTFCVGCLNSIVQTSLTFQLPFCSSNRIDHFYCDVPPLLQLACASTALNELFLFGLCGFIIVSTTLAVLVSYGYITVTILRMHSGSGRHKVFSTCGSHLTAVSLFYGTLFVMYAQPGALTSMEQGKVVSIFYTLVIPMLNPLIYSLRNKDVKDALQRLGQRHSLVKAVRGCPA

SEQ ID NO: 240 - protein, 321 aa, Artificial Sequence
  Synthetic
MATQVHRNGSAVSLQGFVLVGFGGGAKTQALLFAVFLTLYVVTVLGNLTMIVVITLDARLHSPMYFFLKNLSFVDFCYSSVIAPKAMTIFLSSSKVISFAGCATQFFFFSLLVTTEGFLLAVMAYDRFMAICSPLRYPVTMCPMACARLVLGTYCGGCLNSIVQTSLTFQLPFCSSNRIDHFYCDVPPLLQLACADTTLNEFVMFGICGLIIVSTTLVVLISYGYITMTILRMRSGSGRHKVFSTCGSHMTAVSLFYGTVFVMYAQPGALTSMEQGKVVSVFYTLVIPMLNPLIYSLRNKDVKDAPRRLGQRHSLVKEDVQ

SEQ ID NO: 241 - protein, 321 aa, Artificial Sequence; identical to SEQ ID NO: 240
  Synthetic

SEQ ID NO: 242 - protein, 320 aa, Artificial Sequence
  Synthetic
MATSVHRNGSPVSLQGFVLVGFGGSAETQALLFAVFLVLYVVTILGNLTMIMVITLDARLHSPMYFFLKNLSFVDLCLSSVIIPNALANIFSSSKTISFAGCATQFFFFSLLAATEAVLLAVMAYDRFMAICSPLRYPVTMCPMTCARLVLGTFCVACLNSIVQTSLTFQLPFCSSNYIDYFFCDVPPLLQLACASTAINELVMFGICGFIIVCAVFVVIISYGYITVTILRMRSGSGRHKVFSTCGSHMTAVSLFYGTGFVIYGQPGGVASMEQGKVVSTIYTLVIPMLNPLIYSLRNKDVKDALRRLGQRHSLVKESG

SEQ ID NO: 243 - protein, 315 aa, Artificial Sequence
  Synthetic
MKLEQSRNYTELTDFILLGFWTSPEAQVPLFLLFLFIYLVILLGNLSMLTVIKIDSRLHTPMYFFLQNLSFLDLCYSTVIAPKTLATIFSKEKKISYNECATQFFFFALFVGTEGFLLAVMAYDRFSAICSPFLYTVHMSQPACIRLVAGSYICGCINSMIQTGFTFSLRFCGENRLDHFFCDVPALIKISCVDTFVNEIVLFILSALIIISTITIILVSYAYILSTVLKIPSTHGRSKTFSTCGSHIAVVSLFYGTVFFMYAQPGSISSPEKSKIVAVFYTLIIPMLNPLIYSLRNTEVKSALKKTLLRKISWQ

SEQ ID NO: 244 - protein, 315 aa, Artificial Sequence
  Synthetic
MKLEQSRNYTELTDFILLGFWTSPEARVPLFLLFLFIYLVIVLGNLSMLTVIKIDSRLHTPMYFFLQNLSFLDLCYSTVIAPKALATFFSKEKKISYNECATQFFFFALFVGTEGFFLAVMAYDRFSAICSPFLYTVHMSQPACIRLVAGSYICGCINSMIQTGFTFSLRFCGENRLDHFFCDVPALIKISCVDTFVNEIVLFILSALIIISTITIILVSYAYILSTVLKIPSTHGRSKTFSTCGSHIAVVSLFYGTVFFMYAQPGSISSPEKSKIVAVFYTLIIPMLNPLIYSLRNTEVKSALKKTLLRKIPWH

SEQ ID NO: 245 - protein, 320 aa, Artificial Sequence
  Synthetic
MGDRETSNHSDMTDFILVGFRVSPELHILLFLLFLLVYAMILLGNLGMMAIIMTDPRLNTPMYFFLGNLSFIDLFYSSVIAPKAMSNFWTESKSISFAGCVAQIFLFALFIVAEGFLLAAMAYDRFIAICNPLLYSVHMSTRLCTQLVAGSYFCGCISSVLQTSMTFTLSFCASRAIDHFYCDSRPLQRLSCSDIFIHKIVSFSLSGIIILPTITVIIVSYMYIVSTVLKIRSVEGRKKAFSTCSSHLGVVSVLYGAVFFMYLTPDRFPELSKLASLCYSLVTPMLNPLIYSLRNKDVRDALSKLLEKKKCSGSFFPFYK

SEQ ID NO: 246 - protein, 320 aa, Artificial Sequence; identical to SEQ ID NO: 245
  Synthetic

SEQ ID NO: 247 - protein, 313 aa, Artificial Sequence
  Synthetic
MGDRETSNHSDMTDFILVGFRVSPELHILLFLLFLLVYAMILLGNLGMMAIIMTDPRLNTPMYFFLGNLSFIDLFYSSVIAPKAMSNFWTESKSISFAGCVAQLFLFALFIVAEGFLLAAMAYDRFIAICNPLLYSVHMSTRLCTQLVAGSYFCGCISSVLQTSMTFTLSFCASRAIDHFYCDTRPVQRLSCNNLFVHKIVSFSLSSIIILPTVIVIIVSYMYIVSTVLKIRSVEGRKKAFSTCSSHLGVVSVLYGAVFFMYLTPDRFPELSKLASLCFSLVTPMLNPLIYSLRNKDVRDALSKLLEKKKFIL

SEQ ID NO: 248 - protein, 313 aa, Artificial Sequence
  Synthetic
MGDRGTSNHSEMTDFILAGFRVRPELHILLFLLFLFVYAMILLGNVGMMTIIMTDPRLNTPMYFFLGNLSFIDLFYSSVIEPKAMINFWSENKSISFAGCVAQLFLFALLIVTEGFLLAAMAYDRFIAICNPLLYSVQMSTRLCTQLVAGSYFCGCISSVIQTSMTFTLSFCASRAVDHFYCDSRPLQRLSCSDLFIHRMISFSLSCIIILPTIIVIIVSYMYIVSTVLKIHSTEGHKKAFSTCSSHLGVVSVLYGAVFFMYLTPDRFPELSKVASLCYSLVTPMLNPLIYSLRNKDVQEALKKFLEKKNIIL

SEQ ID NO: 249 - protein, 316 aa, Artificial Sequence
  Synthetic
MAKNNITTVTEFILIGFNDHPKWEIPLLLVFLSFYLVTMLGNLGMVILIHVDVQLHIPMYFFLSHLSVLDACYTSVITPQILATLATGKTVISYRCCAAQFFFFTICAATECFLLSVMAYDRYVAISNPLLYTVAMGPRKCWSLVVGAYICGVCGAILRTTCTFSLSFCENNQINFFFCDLPPLLKLACSDTTNIEIIIVFFGNFVILANALVILISYLLIIKAVMRMKSSGRRAKTFSTCVSHLTAVALLFGTLIFMYIRSGSKKSLDEDKVVSVFYTVVIPMLNPLIYSLRNKDVKAAFKKVTGKCQVSQCTQH

SEQ ID NO: 250 - protein, 316 aa, Artificial Sequence
  Synthetic
MAKNNITTVTEFILIGFNDHPKWEIPLFLVFLSFYLVTMLGNLGMVILIHVDVQLHIPMYFFLSHLSVLDACYTSVITPQILATLATGKTVVSYGRCAAQFFFFTICAATECFLLSVMAYDRYVAISNPLLYTVAMGPRKCWSLVVGAYVCGMCGAILRTTCTFSLSFCENNQINFFFCDLPPLLKLACSDTTNIEIIIVFFGNFVISANALVILISYLLIIKAVMRMKSSGRRAKTFSTCVSHLTAVALLFGTLIFMYIRSGSKKSLEEDKVVSVFYTVVIPMLNPLVYSLRNKDVKAAFKKVTGKWQVSHSIQY

SEQ ID NO: 251 - protein, 314 aa, Artificial Sequence
  Synthetic
MDNNNLTTVTEFILVGFTDHPEWEVPLFLVFLCFYLVTILGNLGMVILIQMDVQLQSPMYFFLSHLSVLDACYTSVITPQILAMLATGKTVISYNHCAAQFFFFTFCASTECFLLAVMSYDRYVAISNPLLYTVAMSPKKCWSLVLVAYVCGLSGSIQRTTCTFSLSFCEDNKINFFFCDLPPLLKLACSDTTNAEIIIVLFGNFVILVNALVILTSYLLIIKTVMRIKSSGGRGKTFSTCVSHLTAVALFFGTLTFMYIRSGSGKSPEEDKVVSVFYTVIIPMLNPLIYSLRNKDVKAGFRKLTSRLQVSQSV

SEQ ID NO: 252 - protein, 314 aa, Artificial Sequence
  Synthetic
MAKNNLTRVTEFILMGFMDHPKLEIPLFLVFLSFYLVTLLGNVGMIMLIQVDVKLYTPMYFFLSHLSLLDACYTSVITPQILATLATGKTVISYGHCAAQFFLFTICAGTECFLLAVMAYDRYAAIRNPLLYTVAMNPRLCWSLVVGAYVCGVSGAILRTTCTFTLSFCKDNQINFFFCDLPPLLKLACSDTANIEIVIIFFGNFVILANASVILISYLLIIKTILKVKSSGGRAKTFSTCASHITAVALFFGALIFMYLQSGSGKSLEEDKVVSVFYTVVIPMLNPLIYSLRNKDVKDAFRKVARRLQVSLSM

SEQ ID NO: 253 - protein, 314 aa, Artificial Sequence; identical to SEQ ID NO: 252
  Synthetic

SEQ ID NO: 254 - protein, 315 aa, Artificial Sequence
  Synthetic
MADNGTRLTEFILMGFQLQAELQLGLFFTFLTFYLITIAGNLGMIMLIQSDPRLQTPMYFFLSHLSFLDICYSSVIVPQLLEILGNNKMVITYEHCATQFFFFTFYASTECFLLAVMAYDRYVAVCNPLLYAMAMTPQTRLGLVAAAYSGAMVNTVVRTGCTFSISFCKSNQVDFLFCDLPPLMKLACSETKLQEQVIFLFAFLVIITSVSVILVSYLFIIWAILKIRTAGAKAKTFSTCASHMIAVALFFGTIIFMYLKGNMGKSLWEDKIVSVFYTVVIPMLNPMIYSLRNKEVKEALKKAFKRIKSSQESKT

SEQ ID NO: 255 - protein, 315 aa, Artificial Sequence
  Synthetic
MADNGTRLTEFILIGFQLQAELQLCLFFIFLAFYLITIVGNLGMIMLIQSDPRLQTPMYFFLSHLSFLDVCYSSVIVPQLLETLGSNKMVITYERCATQFFFFTLYASTECFLLAVMAYDRYVAVCNPLLYAMAMTPQTRLGLVAAAYSGAMVNTVVRTGCTFSISFCKSNQVDFFFCDLPPLLKLSCSETKLREQVIFLFAFLVITTSVSVILVSYLFIIWAILKIRTAGAKAKTFSTCASHMIAVALFFGTLIFMYLKGNMGKSLWQDKIVSVFYTVVIPMLNPMIYSLRNKEVKEALKKAFKRIKASQESKT

SEQ ID NO: 256 - protein, 310 aa, Artificial Sequence
  Synthetic
MAEMNLTLVTEFLLIAFTEYPEWALPLFLLFLFMYLITVLGNLEMIILILMDHQLHAPMYFLLSHLAFMDVCYSSITVPQMLAVLLEHGAALSYTRCAAQFFLFTFFGSIDCYLLALMAYDRYLAVCQPLLYVTILTQQARLSLVAGAYVAGLISALVRTVSAFTLSFCGTSEIDFIFCDLPPLLKLTCGESYTQEVLIIMFAIFVIPASMVVILVSYLFIIVAIMGIPAGSQAKTFSTCTSHLTAVSLFFGTLIFMYLRGNSDQSSEKNRVVSVLYTEVIPMLNPLIYSLRNKEVKEALRKILNRAKLS

SEQ ID NO: 257 - protein, 310 aa, Artificial Sequence; identical to SEQ ID NO: 256
  Synthetic

SEQ ID NO: 258 - protein, 311 aa, Artificial Sequence
  Synthetic
MAKVNLTLVTEFLLIAFTEHPEWGLPLFHLFLFIYLFTLLGNSGMIVLIRMDRRLHTPMYFLLSHLSFMDICYSSVTVPQTMAVLLEHGAALSYARCVAQFFLFTFFGSIDCYLLALMAYDRYVAVCQPLLYVTIMTQKALLSFVAGAYIAGLLSALVRTISAFTLSFCGNNEIDFIFCDLPPLLKLTCGESYIQELVIIVFAIFVIPACMVVIVVSYLFIIVAILRIPSAGGRAKTFSTCASHLTAVSLFFGTLIFMYLRDNSGQASEKDRVVSVFYTTVIPMLNPLIYSLRNKEVKEALKNFLNRVKTF

SEQ ID NO: 259 - protein, 314 aa, Artificial Sequence
  Synthetic
MAGRNYTFVTEFFLTAFTEHPEWGLPLFLLFLSFYLATLLGNTGMIILIQKNRRLQTPMYFFLSHLSFVDICYSSVIIPQMLAVLWEHGSTISQVRCAVQFFLFTFFASIDCYLLAIMAYDRYVAVCQPLLYVTIMTEKARVGLVTGAYVAGFSSGFIRTVTAFTLSFCGNNEINFIFCDLPPLLKLVCGDSYIQEVVIIVFAIFVMPACIVVISVSYLFIIVAIMQIRSAGGRAKTFSTCTSHLTAVALFFGTLIFMYLRDNTDQFSERDRVVSVFYTVVTPLLNPLIYSLRNKEVKEAITKSLRRSKISRAP

SEQ ID NO: 260 - protein, 314 aa, Artificial Sequence; identical to SEQ ID NO: 259
  Synthetic

SEQ ID NO: 261 - protein, 270 aa, Artificial Sequence
  Synthetic
MILLIRGDRRLHTPMYFFLSHLSLVDICYSSAIIPQMLAVLWEHGTTISQARCAAQFFLFTFFASIDCYLLAIMAYDRYTAVCQPLLYVTIITEKARWGLVTGAYVAGFFSAFVRTVTAFTLSFCGNNEINFIFRDLPPLLKLSCGDSYTQEVVIIVFALFVMPACILVILVSYLFIIVAILQIHSAGGRAKTFSTCASHLTAVALFFGTLIFMYLRDNTGQSSEGDRVVSVLYTVVTPMLNPLIYSLRNKEVKEATRKALSKSKPARRP

SEQ ID NO: 262 - protein, 314 aa, Artificial Sequence
  Synthetic
MAERNYTVVTEFFLTAFTEHLQWRVPLFLIFLSFYLATMLGNTGMILLIRGDRRLHTPMYFFLSHLSLVDICYSSAIIPQMLAVLWEHGTTISQARCAAQFFLFTFFASIDCYLLAIMAYDRYTAVCQPLLYVTIITEKARWGLVTGAYVAGFFSAFVRTVTAFTLSFCGNNEINFIFCDLPPLLKLSCGDSYTQEVVIIVFALFVMPACILVILVSYLFIIVAILQIHSAGGRAKTFSTCASHLTAVALFFGTLIFMYLRDNTGQSSEGDRVVSVLYTVVTPMLNPLIYSLRNKEVKEATRKALSKSKPARRP

SEQ ID NO: 263 - protein, 312 aa, Artificial Sequence
  Synthetic
MADVNFTFVTEFILLGLTDRDELKVFLFILFLLIYVISLVGNLGMFMLIHITPKLHTPMYHFLRSLSFVDACYSSVFAPTLLLNFFVERETISFSACILQYFLFASLLTTEGFLLAAMAFDRYVAIVNPLTYTVVMTKLICVLLVLGSCLGGTITSLTHTIGLIKLSFCGPNVISHFFCDLPPLLKLSCSDTSMNELLLLVFSGVIAITTLLTVVLSYIFIVAAILRIRSAAGRHKAFSTCASHLTAVTLFYGSISFSYIQPSSQYSLEQEKVVSVFYTLVIPMLNPLIYSLRNKEVKDAVKRVMEIKHSLH

SEQ ID NO: 264 - protein, 312 aa, Artificial Sequence
  Synthetic
MATENCTVVTEFILLGLTDRAELKMMLFVLFLVIYAVTLLGNLGMILLIRITPKLHTPMYFFLSCLSFVDACYSSVIAPKMLISFLVVTETISFSACIMQHLFFGVLVTTEGFLLSVMAYDRYVAVVNPLLYTVSMSKQKCIMMVTGSVIGGTINSLTHTISLSKLSFCGPNIVGHFFCDIPSLLILSCSDTSMNEFLLLIFSGVIAIGTLLIVFISYLFIALAILRIRSASGRQKAFSTCASHLTAVTIFYGTLSFNYIQPSSQYSVEQEKVVSVFYTLVIPMLNPMIYSLRNKEVKEAAKRAIEMKSFSC

SEQ ID NO: 265 - protein, 312 aa, Artificial Sequence
  Synthetic
MATENCTVVTEFILLGLTDRAELKMMLFVLFLVIYAVTLLGNLGMILLIRITPKLHTPMYFFLSCLSFVDACYSSVIAPKMLISFLVVTETISFSACIMQHLFFGVLVTTEGFLLSVMAYDRYVAVVNPLLYTVSMSKQKCIMMVTGSVIGGTINSLTHTISLSKLSFCGPNIVGHFFCDIPSLLILSCSDTSMNEFLLLIFSGVIAIGTLLIVFISYLLIALAILRIRSASGRQKAFSTCASHLTAVTIFYGTLSFNYIQPSSQYSVEQEKVVSVFYTLVIPMLNPMIYSLRNKEVKEAAKRAIEMKSFSC

SEQ ID NO: 266 - protein, 312 aa, Artificial Sequence
  Synthetic
MADDNFTVVTEFILLGLTDHAELKAVLFVVFLVIYAITLLRNLGMILLIQITSKLHTPMYFLLSCLSFVDACYSSAIAPKMLVNLLVVKATISFSACMVQHLCFGVFITTEGFLLSVMAYDRYVAIVSPLLYTVAMSDRKCVELVTGSWIGGIVNTLIHTISLRRLSFCRLNAVSHFFCDIPSLLKLSCSDTSMNELLLLTFSGVIAMATFLTVIISYIFIAFASLRIHSASGRQQAFSTCASHLTAVTIFYGTLIFSYIQPSSQYFVEQEKVVSMFYTLGIPMLNLLIHSLRNKDVKEAVKRAIEMKHFLC

SEQ ID NO: 267 - protein, 312 aa, Artificial Sequence; identical to SEQ ID NO: 266
  Synthetic

SEQ ID NO: 268 - protein, 312 aa, Artificial Sequence
  Synthetic
MGIRNHTSVKEFILIGLTENPNWQVPLFFLFCIVYFIILVGNWGMIILIWLNAQLHTPMYFFLSNLSFCDICYSTIIAPKMLINFLSEHKSTRLFACILQSFFFAVYVTTEVILLSMMAYDRYVAIANPLMYTVIMTNNICTQMVLASYLGGLINSMIHTIGLLKLDFCGPNIVNHFFCDVPPLLKLACSDAHINEMLLLVFSGVFAISTFIIVMVSYIHIIIAILRIRSAEGRRKAFSTCASHLTAVALFYGSLTFNYIQPSSQYSMEQEKLSAVFYTLVIPMLNPLIYSLRNKDVKEAAKKLICGERNAP

SEQ ID NO: 269 - protein, 312 aa, Artificial Sequence
  Synthetic
MAIWNHTGVSEFILVGLTENPNWQVPLFLLFSVVYFIILVGNWGMIILIWLNAQLHTPMYFFLSNLSFCDICYSTIIAPKMLLNFLSEHKSSTFFACILQSFFFAVYVTTEVILLSMMAYDRYVAIANPLMYTVIMTHNICTQMVLASYLGGLINSMIHTIGLLKLDFCGPNIVNHFFCDVPPLLKLACSDAHINEMLLLVFSGMIAIFTFIIIMVSYIHIIIAILRIRSAEGRRKAFSTCASHLTAVTLFYGSLTFNYIQPSSQYSMEQEKLSAMFYTLVIPMLNPLIYSLRNKDVKEAAKRLICRESSTS

SEQ ID NO: 270 - protein, 312 aa, Artificial Sequence
  Synthetic
MRVWNHTGVKEFMLLGLTENPNCQVPLFLLFSIVYLIILVGNWGMIILIWLNAHLHTPMYFFLSNLSFCDICYSTVIAPKMLIDFLSEHKSSTFFGCVLQSFFFAVYITTEGILLSMMAYDRYVAIANPLMYTVIMTHRICSQMVLACYLGGLINSLTHTIGLLRLDFCGPNIVNHFFCDIPPLLKLACSDAHNNEMLLLVFSGVIAIFTFIIVMVSYIHIIIAILRIRSAEGRRKAFSTCASHLTAVILFYGSVTFSYIQPSSQYSMEQEKVSAVFYTLVIPMLNPLIYSLRNKDVKEAAKKFIGRERRTS

SEQ ID NO: 271 - protein, 312 aa, Artificial Sequence
  Synthetic
MDPGNHTVVKEFILLGLTENPDWQIPLFLLFSIIYLIIFVGNWGMIFLIWLNAHLHTPMYFFLSNLSFCDICYSTVIAPKMLINIVSEHKSSRLLSCVLQSFFFMVYATTEVILLSMMAYDRYVAIVNPLMYTVIMTFSICISMVLACYLCGIINSLTHTISLLRLDFCGPNVVNHFFCDVPPLLKLSCSDAHINEMLLLVFSGVIAIFTFIIVMVSYIHIIIAILKIRSTEGRRKAFSTCASHLTAVTLFYGSGTFSYIQPSSQYSMEQEKVSAVFYTLVIPMLNPLIYSLRNKDVKEAAKKLICGWSNTS

SEQ ID NO: 272 - protein, 312 aa, Artificial Sequence
  Synthetic
MRGWNHTGAKEFLLVGLTENPNLQIPLFLLVTLIYFITLLDNLGIIILIWLNAQLHTPMYFFLGNLSFCDICYSTVFAPKMLVNFLSKHKSSTFSGCVLQSFPFAVYVTTKDILLSMMAYDHYVAIANPLLYTVIMAQKVCIQMVLASYLGGLINSLTHTIGLLKLDFCGPNIVNHYFCDVPPLLRLSCSDAHINEMLPLVFSGLIAMFTFIVIMVSYICIIIAIQRIHAAEGRYKAFSTCVSHLTTVTLFYGSVSFSYIQPSSQYSLEQEKVLAVFYTLVIPMLNPLIYSLRNKDVKDAAKRLIWWGKNPT

SEQ ID NO: 273 - protein, 314 aa, Artificial Sequence
  Synthetic
MEEKNQTIVMEFFFLGLTDHLYQKIALFITILFVYLVTLGGNLGMITLIWADPRLHTPMYFFLSHLSFVDMCSSSSIAPKMLCDIFAEEKRISFMGCAAQMWFFGFFVGTECFLLASMAYDRYTAICKPLLYTLLMSQRVCVHLVVGPYVFAIINITTHTTLAFCLPFCGSNTINHFFCDVSPLLSLACADSWVNKVVLFVLSGAIGVFSGLIIIVSYVSILMTIFKIQTADGKQKAFSTCSSHLSAVSILYGTLFFIYVRPSASFSLNINKMISLFYTVVIPMLNPLIYSLRNKEVKGAFRRKVQKKHFPAGR

SEQ ID NO: 274 - protein, 314 aa, Artificial Sequence
  Synthetic
MEEKNQTVMPEFLFLGITDNFHQKIVIFIIFFFVYLVTLGGNVGMIALIWLDPRLHTPMYFFLSQLSFVDVSSSSSIAPKMLCDIFARNKAISFVGCAAQMWFFGLFVATECFLLAAMAYDRYAAICKPLLYTLIMSPHLSVLLVIGPYAIALISTTTHTTLTFCLPFCGPYIINHFFCDISPLLSLACSDTHINKLVLFVLAGTVGVLSGLIILVSYVCILKAILKIQTANGRRKAFSTCSSHLATVSILYGTLFFIYVRPNVSSSLNINKVISLFYTMVIPMLNPLIYSLRNQEVKNAFRRTLEKKHFLTGA

SEQ ID NO: 275 - protein, 314 aa, Artificial Sequence
  Synthetic
MEEKNQTVMPEFLFRGITDNLHQKIVIFIIFFFVYLVTLGGNVGMITLIWLDPRLHTPMYFFLSQLSFVDVSSSSSIAPKMLCDIFARNKAISFVGCATQMWFFGLFVATECFLLAAMAYDRYAAICKPLLYTLIMSPHLCMLLVVGIYFIALISTMIHTTLTFCLPFCGPYIINHFFCDVSPLLSLACTDTQMIKLVFFVLAGTVGMFTGLIILGSYVCILKAILKIQTANGRQKAFSTCSSHLVTVAILYGTLFFIYVRPNASSSLNINKVISLFYTVVIPMLNPLIYSLRNQEVKNAFRRTLKKKHFLIGV

SEQ ID NO: 276 - protein, 318 aa, Artificial Sequence
  Synthetic
MMHRNQTVVTEFFFTGLTSSFHLQIVLFLTFLCVYLATLLGNLGMIILIHLDTRLHIPMYFFLSHLSFVDACSSSVISPKMLSDMFVDKKVISFLGCAIQLCLFSQFVVTECFLLASMAYDRYVAICKPLLYTLIMSQRVCVQLVIGPYSIGFISTMVHIISAFVLPYCGPNLINHFFCDLLPVLSLACANTQMNKRLLFIVAGILGVFSGIIILVSYVYIAITILKISSADGRRKAFSTCSSHLTAVSILYGTLFFIYVRPSSSFSLDINKVVSLFYTTVIPMLNPFIYSLRNKEVKDALIRTFEKQFCYSLQDKIL

SEQ ID NO: 277 - protein, 318 aa, Artificial Sequence
  Synthetic
MMHRNQTVVTEFFFTGLTSSFHLQIVLFLTFLCVYLATLLGNLGMIILIHLDTRLHIPMYFFLSHLSFVDACSSSVISPKMLSDMFVDKKVISFLGCAIQLCLFSQFVVTECFLLASMAYDRYVAICKPLLYTLIMSQRVCVQLVIGPYSIGFVSTMVHIISAFVLPYCGPNLINHFFCDLLPVLSLACANTQMKKRLLFIVAGILGVFSGIIILVSYVYIAITILKISSADGRRKAFSTCSSHLTAVSILYGTLFFIYVRPSSSFSLDINKVVSLFYTTVIPMLNPFIYSLRNKEVKDALIRTFEKQFCYSFQDKIL

SEQ ID NO: 278 - protein, 318 aa, Artificial Sequence
  Synthetic
MMHRNQTVVTEFFFTGLTSSFHLQIVLFLTFLCVYLATLLGNLGMIILIHQDTRLHIPMYFFLSHLSFVDACSSSVISPKMLSDIFVDKKVISFLGCAIQFCLFSQFVVTECFLLASMAYDRYVAICKPLLYTLIMSQRVCVQLVIGPYSIGLISTVVHTTSAFILPYCGPNLINHFFCDLLPVLSLACADTQMNKHLLFIMAGILGVFSGIIILVSYVYIAITILKINSADGRRKAFSTCSSHLTAVSILYGTLFFIYVRPSSSFSLDINKVVSLFYTAVIPMLNPFIYSLRNKEVKDALIRTFEKKFCYSLQDKIL

SEQ ID NO: 279 - protein, 314 aa, Artificial Sequence
  Synthetic
MADENYTRITEFIFIGLRYHPNLQVFLFLLFLLFYLVTMTGNLGMIILIRVDSRLHTPMYFFLSHLSFVDICFSSVVAPKMLTDFFADKKAISFLGCVLQQWFFGFFVAIECLLLASMAYDRYVAICNPLLYSVAMSQRLCIQLVIGPYAVGFFNTMTHTTAAFRLPFCGSNIINHFFCDMSPILSLICADIRINKLLVFIVAGAVLIVSSTTIIVSYFHILIAILRIRSAEGRRKAFSTCSSHVTAVSILYGTLFFIYVRPSAISSLDLNKVVSVFYTAVIPMLNPLIYSLRNKEVKSAMGRTVAKAKVFLKN

SEQ ID NO: 280 - protein, 310 aa, Artificial Sequence
  Synthetic
MDKENSSMVTEFIFMGITQDPQMEIIFFVVFLIVYLVNVVGNIGMIILITTDTQLHTPMYFFLCNLSFVDLGYSSAIAPRMLADFLTNHKVISFSSCATQFAFFVGFVDAECYVLAAMAYGRFVAICRPLHYSTFMSKQVCLALMLGSYLAGLVSLVAHTTLTFSLSYCGSNIINHFFCEIPPLLALSCSDTYISEILLFSLCGFIEFSTILIIFISYTFILVAIIRMRSAEGRLKAFSTCGSHLTGITLFYGTVMFMYLRPTSSYSLDQDKWASVFYTVIIPMLNPLIYSLRNKDVKAAFKKLIGKKSQ

SEQ ID NO: 281 - protein, 310 aa, Artificial Sequence; identical to SEQ ID NO: 280
  Synthetic

SEQ ID NO: 282 - protein, 310 aa, Artificial Sequence
  Synthetic
MDKENHSVVTEFVFMGITQDPQLQIIFFVVFLLVYLVNVIGNVGMIILIITDSQLHTPMYFFLCNLSFVDLGYSSAIAPRMLADFLTKHKVISFSSCATQFAFFVGFVDAECYVLAAMAYDRFVAICRPLHYSTLMSKKVCLVLMLGSYFAGLVSLVAHTSLTFSLSYCGSNIINHFFCEIPPLLALSCSDTYISEILLFSLCGFIEFSTILIIFISYAFILIAIIRIRSAEGRLKAFSTCGSHLTGVTLFYGTVMFMYLRPTSSYSLDQDKWASVFYTIIIPMLNPLIYSLRNKDVKAAFKKLIGKKPQ

SEQ ID NO: 283 - protein, 310 aa, Artificial Sequence; identical to SEQ ID NO: 282
  Synthetic

SEQ ID NO: 284 - protein, 319 aa, Artificial Sequence
  Synthetic
MLESNYTMPTEFLFVGFTDYLPLRVTLFLVFLLVYTLTMVGNILLIILVNINSSLQIPMYYFLSNLSFLDISCSTAITPKMLANFLASRKSISPYGCALQMFFFASFADAECLILAAMAYDRYAAICNPLLYTTLMSRRVCVCFIVLAYFSGSTTSLVHVCLTFRLSFCGSNIVNHFFCDIPPLLALSCTDTQINQLLLFALCSFIQTSTFVVIFISYFCILITVLSIKSSGGRSKTFSTCASHLIAVTLFYGALLFMYLQPTTSYSLDTDKVVAVFYTVVFPMFNPIIYSFRNKDVKNALKKLLERIGYSNEWYLNRL

SEQ ID NO: 285 - protein, 319 aa, Artificial Sequence; identical to SEQ ID NO: 284
  Synthetic

SEQ ID NO: 286 - protein, 312 aa, Artificial Sequence
  Synthetic
MQYTNYTKPTEFIFIGFTDYQPLRLMLFLVFFIVYTLTLVGNIGLIILVNIDLSLQTPMYHFLSNLSFLDISYSTAIAPKMLVDFLASKKSISFCGCAIQMFFFACFADAECLILAAMAYDRYAAICNPLLYSTLVSRRVCFSFVVLAYFSGSVTSLVHVSLAFMLPYCRSNIVNHFFCDIPPLLALSCADTHINELLLFALCGTIQTSTFMVILISYSCILITVLSIKSTGGRSKTFSTCASHLIAVTLFYGTLLFMYLRPTTSYSPDTDKVVALFYTVVFPMLNPIIYSFRNKDVKNALKKLFDRLGIFR

SEQ ID NO: 287 - protein, 318 aa, Artificial Sequence
  Synthetic
MNSENLTAVAPAEFVLLGITNRWDLRVALFLTCLPVYLVSLLGNMGMALLIRMDARLHTPMYFFLANLSLLDACYSSAIGPKMLVDLLLPRATIPYTACALQMFVFAGLADTECCLLAAMAYDRYVAIRNPLLYTTAMSQRLCLALLGASGLGGAVSAFVHTTLTFRLSFCRSRKINSFFCDIPPLLAISCSDTSLNELLLFAICGFIQTATVLAITVSYGFIAGAVIHMRSVEGSRRAASTGGSHLTAVAMMYGTLIFMYLRPSSSYALDTDKMASVFYTLVIPSLNPLIYSLRNKEVKEALRQTWSRFHCPGQGSQ

SEQ ID NO: 288 - protein, 321 aa, Artificial Sequence
  Synthetic
MNSENFTRVMPAEFILLGITNRWDMRVTLFLIFLPIYLVSLLGNVGMVLLIRIDARLHTPMYFFLANLSLLDAFYSSAIGPKMLVDLLLSRATIPYVACALQMFVFAGLADAECCLLAVMAYDRYVAIGNPLLYTTVMSPRLCLALLGASGLGGAVSAFVHTTFTFRLSFCGSLEVNSFFCDIPPLLAISCNDTSLNELLLFAVCGFIQTTTVLAIAVSYGFIAVAVIRMQSAEGRRRAASTCGSHLTAVSILYGTLIFMYLRPSSSYALDTDKMASVFYTLVIPALNPLIYSLRNKEVKEAFQRTWHRFCCPGRSTRDWP

SEQ ID NO: 289 - protein, 321 aa, Artificial Sequence; identical to SEQ ID NO: 288
  Synthetic

SEQ ID NO: 290 - protein, 310 aa, Artificial Sequence
  Synthetic
MDEGNCSSNTEFVLLGITNNPSMKVGLFIVFLIIYLIILVANIGMIVLIKLDPQLHTPMYFFLSHLSFSDLCYSTAVGPKMLVDLMVKQKIIPFVGCALQFFFTCIFVDAECMLLAVMAFDRYKAISNPLMYVVGMSSKFCYQLLAGVYLVGMIDTVIHTIMTFGLCFCGSNEINHFFCDIPPILLLSCSDTQTNELITFVIFGFIELSTISGVLVSYCYIISSVLKIRSTDGRFKAFSTCASHLTAVAIFQGTLLFMYFRPASAYSLDQDKITSLFYTLVIPMLNPLIYSLRNKDVQEALQKLKKKIFF

SEQ ID NO: 291 - protein, 311 aa, Artificial Sequence
  Synthetic
MDEGNCSSITEFILLGITDDPSMKVVLFISFLIIYLIILVANIGIIVLIRIDPQLHTPMYFFLSHLSFSDLCYSTAVGPKMLVDLLAKHKSLSFLGCALQFFFTCVFIDVECVLLAVMAFDRYKAISNPLMYVVDMSSRFCYQLLAGVYVLAMIDTLMQTIITFGLCFCRSNEINHFFCDLPPILLLSCSDIYVNELALFVFSGFVELCTISGLLVSYSYIIASVLKISCDEGRFKAFSTCASHLTAVAIFQGTLLFMYFRPSSSYSLDQDKTTSLFYTLVIPMLNPLIYSLRNKDVKEALYKLRNKRSFK

SEQ ID NO: 292 - protein, 314 aa, Artificial Sequence
  Synthetic
KQRRMEVGNCSATEFLLLGITNNPVIKVILFTTFLIVYLIILIENLGMIILIRMNSQLHTPMYFFLSHLSFSDICYSTAVGPKMLVGLIFKNNSIPFIDCAVQFFIFCIFTDAECVLLAVMAFDRYKAISNPLMYAVDMSRVVCYQLLAVVYLVGMVDALTHTTLTFHLCFCQSKEINHFFCDVPPLLLLSCSDTEVNELVIFTLFGFIELSTISGVLVSYCYIISSVLKIRSAEGRFKAFSTCTSHLTVVAIFQGTMLFMYFRPSSAYSLDQDKMTSLFYTLVIPMLNPLIYSLRNKDVKASVKRSLKSRISF

SEQ ID NO: 293 - protein, 309 aa, Artificial Sequence
  Synthetic
MEVGNCSATEFLFLGITNNPVIKVILFTTFLIVYLIILIENLGMIILIRMDHQLHIPMYFFLSHLSFSDVCYSSAVGPKMLLDLLAKSNSITFLGCVLQFFIFCIFTDVECMLLAMMAFDRYKAISNPLLYAVDMSSKVCYQLLAVVYTVAIVDAVVHTTLTFRLCFCGSKEINHFFCDLPPLYMLSCSDIQVNELALFTVFGFIELSTISGVLVSYCYIILSVLKIRSAEGRFKAFSTCTSHLTAVAIFQGTMLFMYFRPSSSYSLDQDKMTSLFYTLVIPVLNPLIYSLRNKDVKEALQKLKTKTWF

SEQ ID NO: 294 - protein, 311 aa, Artificial Sequence
  Synthetic
MDKGNCSTLTEFLLLGITSNPEVKVFLFTMFLVVYLTNLLTNLGMIILIRMDPQLHTPMYFFLSHLSFSDLCYSTAVGPKMLVDLLSKNTSIPFLGCAMQFFTFCIFIDAECVLLAVMAFDRYKAISNPLLYAVDMSRKVCFQLLTGVYSVALADALIHTTLTFHLCFCGSNEINHFFCDIPPVLVLSCSDTQVNVLVIFTVFGFIELSTISGVLISYCYIISSVLKISSAAGRLKAFSTCTSHLTAVAIFQGTMLFMYFRPSSSYSLDQDKVTSLFYTLVIPMLNPLIYSLRNKDVKEALQRIRSKMCLK

SEQ ID NO: 295 - protein, 309 aa, Artificial Sequence
  Synthetic
MDIGNCSLNEFIFVGVTNNPEMKGTLFTIFLLIYLINLLGNIGMIILIRMDPQLHTPMYFFLSHLSFCDLCYSTAIGPKMLLDMFGKNKSIPFWGCALQLFIFCVFADSECVLLAVMAFDRYQAISNPLLYTANMSSRKCFMFMAGVYLVGTSDALIHTTLAFRLCFCGSNEINHFFCDLPPLYLLSCLDTQVNYLALFTIYGFLELSTISGVLVSYCYIISSILKIRSAEGRFKAFSTCTSHLTAVAIFQGTLLFTYFRPSSSYSLDQDKMTSLFYTLVIPMLNPLIYSLRNKDVKEALKKIKRKRWF

SEQ ID NO: 296 - protein, 307 aa, Artificial Sequence
  Synthetic
MNIGNCSLNEFIFVGVTNNPEMKGTLFTIFLLIYLINLLGNIGMIILIRMDPQLHTPMYFFLSHLSFCDLCYSTAIGPKMLVDMFGKNKSIPFWGCAVQFFISCTFADSECVLLAVMAFDRYQAISNPLLYTANMSSRKCFMFMAGVYLVGTSDALIHTTLAFRLCFCGSNEINHFFCDLPPIYLLSCSDTQVNYLALFTIYGFLELSTISGVLVSYCYIISSVLKIRSTEGRFKAFSTCTSHLTAVAIFQGTLLFTYFRPSSSYSLDQDKMTSLFYTLVIPMLNPLIYSLRNKDVKEALGKMKRKR

SEQ ID NO: 297 - protein, 308 aa, Artificial Sequence
  Synthetic
MEKKNCSSVDEFIFLGITKNPDMRVTFFTTLLLVYLINLLANLGMIILIRVNTQLHTPMYFFLSHLSFCDLCYSTAIGPKMLVDLLVEEKSIPIVGCALQFFTFCIFADSECLLLAVMAYDRYQAISNPLLYTVNMSSRLCSLLMAGVYLVGTADALIHTTLTFRLCFCGSNEINHFFCDVPPLLLISCSDTEVNELAIFTIFGFIELSTISGVLVSYCYIISSVLKIGSAEGRFKAFSTCASHLTAVAVFQGTMLFMYFRPSSAYSLDQDKMTSLFYTLVIPMLNPLIYSLRNKDVKEAVVKLKNKW

SEQ ID NO: 298 - protein, 308 aa, Artificial Sequence; identical to SEQ ID NO: 297
  Synthetic

SEQ ID NO: 299 - protein, 308 aa, Artificial Sequence
  Synthetic
MDRGNCSSVDEFIFLGITNNPVKKVALFTTFLVVYLITLLANLGIIILIRMNTQLHTPMYFFLSNLSFCDFCYSTAIGPKMLVDLLAAEKSIPFFGCAVQFLIFCVFADSECLLLAVMAFDRYQAISNPLLYTVNMSSMVCFMLMTGVYLVATTDGLIHTILAFRLCFCGSNEINHFFCDLPPLYLLSCSEIQVNELALFTVFGFIELSTISGVLVSYCYIILSVLKIRSAEGRFKAFSTCTSHLTTVAIFQGTMLFMYFRPSSSYSLDQDKMTSLFYTLVIPMLNPLIYSLRNKDVKEALQRLKMKM

SEQ ID NO: 300 - protein, 310 aa, Artificial Sequence
  Synthetic
MDWENCSSLTDFFLLGITNNPEMKVTLFAVFLAVYIINFSANLGMIVLIRMDYQLHTPMYFFLSHLSFCDLCYSTATGPKMLVDLLAKNKSIPFYGCALQFLVFCIFADSECLLLSVMAFDRYKAIINPLLYTVNMSSRVCYLLLTGVYLVGIADALIHMTLAFRLCFCGSNEINHFFCDIPPLLLLSRSDTQVNELVLFTVFGFIELSTISGVFISYCYIILSVLEIHSAEGRFKALSTCTSHLSAVAIFQGTLLFMYFRPSSSYSLDQDKMTSLFYTLVVPMLNPLIYSLRNKDVKEALKKLKNKILF

SEQ ID NO: 301 - protein, 314 aa, Artificial Sequence
  Synthetic
MQRRMEGENCSSFTEFILMGITNNSEVKVVLFTIFLLVYLINLIGNLGMILLIKVDPQLQTPMYFFLSNLSFCDLCYSTAVGPKMLMDIFGNDKSIQFFGCALQFFISCTFVDSECILLAVMAFDRYQAISNPLLYTTNMSNRLCSLLVAGVYFVGVADSLIHTTLTFHLCFCGSNEIDHFFCDIPPILLLSCSDTQVNELAIFTIFGFIELSTISGVLVSYCYIISSVLKISSAGGRFKAFSTCASHLTAVAIFQGTVLFMYFRPSSSYSLDQDKMSSLFYILVIPMLNPLIYSLRNKDVKEALKNLKNKRCC

SEQ ID NO: 302 - protein, 310 aa, Artificial Sequence
  Synthetic
MDKRNCSSVPEFLLLGITNKPEMKVALFIVFLIVYPTILLTNVGMITLIRMDPQLHIPMYFFLSHLSFSDLCYSTAVGPKMLLDLLEDNNPISFVGCFLQLLIVSIFIDVECMLLAVMAFDRYKAISNPLMYAVDMSSRVCYQFLTAIYVFGTIDGFIHTSLAFSLCFCHSTQINHLFCDLPPVLLLSCSDTHINELVLFMLFGFIELSTISGVLVSYCYIISSVLKISSTGGWFKAFSTCASHLTAVGIFQGTMLFMYFRPSSAYSLDQDKMTSIFYLLVIPMINPLIYSLRNKDVKEALVRLRSKWWF

SEQ ID NO: 303 - protein, 310 aa, Artificial Sequence
  Synthetic
MDKENCSSLPEFFLLGISSKYGVKVVLFVVFLLVYLTTLLENIGMIALIRMDPQLHTPMYFFLSHLSFSDLCYSTAVGPRMLVDLVAEKHSIPFTGCFLQLLFVYVFIDVECMLLAVMAFDRYKAISKPLLYSVDMSSKVCYQFLTLIYLTSTIDGLIHTTLAFNLCFCGSTQINHFFCDLPPLYLLSCSDTQANELVVFTLFGFIELSTISSVLVSYCYIISSVLKISSAGGRFKAFSTCASHLTAVGIFQGTMLFMYFRPSSAYSLDQDKMTSVFYLLIIPMINPLIYSLRNKDVKEALVRLRNKRLF

SEQ ID NO: 304 - protein, 311 aa, Artificial Sequence
  Synthetic
MDKENCSSLPELLLLEITNNPDMKVLILTVFLAINLIVLIINIGMIIFIKMNPQLQTPMYFFLSHLFFSDLSYSSAIGSKMLIDIFSKYKTIPLLFVPFDSFFVCIFIDVECVLPAVMAFDQYKAISHPVIYAIDMSNRVCYQFLAGVYLVGMTDALIHRTLTFCLCFCESHEINHFFCDIPPILLLSCLNTQFNELMIFTIFGFIQLSTISEVLVSYCSIILSVLKIHSAKGRFKAFSTCTLHLTAVAIFQGTLLFTYFQPSTSYSLDQDKMTSLFYTLMIPMLNPLIYSLRYKDVKETLQNLENKRWCK

SEQ ID NO: 305 - protein, 310 aa, Artificial Sequence
  Synthetic
MSVENSTVKTEFYLLGFSDHPELQSLLFAVFFFIYSITLMGNIGMILLITVSPNLHIPMYFFLCMLSFIDACYSSVIAPKLLVDLISDKKVISYNGCATQLYFFCSLVDTESFLLAAMAYDRYIAICNPLLYTVIMSKRVCTHLAFGAFLGGTMSSIIHTTNTFQLSFCSKVINHFFCDISPLFSLSCTDTYTHDIILVVFASLVEAVSLLAVLLSYMYIIVAILKTGSAEGRKKGFSTCASHLTVVTIYHGTLIFIYLRPSTGHSMDIDKMTSVFYTLIIPMLNPLIYSLRNKDVKFAFRKIMSKKSFS

SEQ ID NO: 306 - protein, 314 aa, Artificial Sequence
  Synthetic
FLQIMSVENSTVKTEFYLLGFSDHPELQSLLFAVFFSIYSITLMGNIGMIVLITVSPNLHIPMYFFLCMLSFIDACYSSVIAPKLLVDLISDKKVISYNGCATQLYFFCSLVDTESFLLAAMAYDRYIAICNPLLYTVIMSKRVCIQLAFGAFLGGTMSSIIHTTNTFQLSFCSKVINHFFCDVSPLFSLSCFDTYTHDIILVVFASLVEALSLLTVLLSYMYIIVAICKIGSAEGRKKGFSTCASHLAVITIYHGTLIFIYLRPSTGHSMNIDKMTSVFYTLIIPMLNPLIYSLRNKDVKFAFRKIISKKLFT

SEQ ID NO: 307 - protein, 314 aa, Artificial Sequence
  Synthetic
FLQIMSVENSTVKTEFYLLGFSDHPELQSLLFAVFFSIYSITLMGNIGMILLITVSPNLHIPMYFFLCMLSFIDACYSSVIAPKLLVDLISDKKVISYNGCATQLYFFCSLVDTESFLLAAMAYDRYIAICNPLLYTVIMSKRVCIQLAFGAFLGGTMSSIIHTTNTFQLSFCSKVINHFFCDVSPLFSLSCFDTYTHDIILVVFASLVEALSLLTVLLSYMYIIVAICKIGSAEGRKKGFSTCASHLAVITIYHGTLIFIYLRPSTGHSMNIDKMTSVFYTLIIPMLNPLIYSLRNKDVKFAFRKIISKKLFT

SEQ ID NO: 308 - protein, 313 aa, Artificial Sequence
  Synthetic
MSVENSTVKTEFYLLGFSDHPELQSLLFAVFFSIYSITLMGNIGMIVLITVSPNLHIPMYFFLWMLSFIDACSSSVIAPKLLVDLISDKKVISYNGCATQFYFCCSLVDTESFLLAAMAYDRYIAICNPLLYTVIMSKRVCTQLAFEAFLGGTMSSIIHTTNTFQLSFCSKEINHFFCDMTPLFSLSCFDTYTHDIILVFFTSLVEAVCLLAVLLSYMYIIVAILKTGSAEGRKKGFSTCASHLAVITIYHGTLIFIYLCPSTGHSMDIDKMTSVFYTLIIPMLNPLIYSLRNKNVKFAFRKIISKKLFFLVI

SEQ ID NO: 309 - protein, 314 aa, Artificial Sequence
  Synthetic
MEFTDRNYTLVTEFILLGFPTRPELQIVLFLMFLTLYAIILIGNIGLMLLIRIDPHLQTPMYFFLSNLSFVDLCYFSDIVPKMLVNFLSENKSISYYGCALQFYFFCTFADTESFILAAMAYDRYVAICNPLLYTVVMSRGICMRLIVLSYLGGNMSSLVHTSFAFILKYCDKNVINHFFCDLPPLLKLSCTDTTINEWLLSTYGSSVEIICFIIIIISYFFILLSVLKIRSFSGRKKTFSTCASHLTSVTIYQGTLLFIYSRPSYLYSPNTDKIISVFYTIFIPVLNPLIYSLRNKDVKDAAEKVLRSKVDSS

SEQ ID NO: 310 - protein, 314 aa, Artificial Sequence; identical to SEQ ID NO: 309
  Synthetic

SEQ ID NO: 311 - protein, 316 aa, Artificial Sequence
  Synthetic
MIMEFTSGNYTLVTEFILLGFPTRPELQIILFLVFLTLYGMILIGNIGLMLLIRTDPHLQTPMYFFLSNLSFVDLCYSSVIVPNMLVNFLSAKKSISYLGCALQFYFFCTFADTESFILAAMAYDRYVAICNPLLYTVAMSRSLCIWLIVLSYVGGNMSSLVHTSFAFILKYCDKNIINHFFCDLPPLLKLSCTDTSINEWLLSTYGSSVEIICFFIIIISYFFILLSVLKIRSTSGRKKTFSTCASHLTSVAIYQGTLLFIYSRPSSLYSPNTDKIISVFYTIIIPVLNPLIYSLRNKDVKDAAKKALRSKIQSP

SEQ ID NO: 312 - protein, 312 aa, Artificial Sequence
  Synthetic
MTFENFTMLTEFVFLGLSGRQDVQQGLFALFFLVYGITVIANLGMVILIKLDSRLHTPMYYFLSNLSFCDICYSSTVSPKMLADFLSKEKRIPYNLCAVQMYFFGAFADVECLMLAVMAYDRYVAICNPLLYTIVMSKKLCIQLVAVAYAIGLVDSAIHTSCTFRLSFCNSNVINHFFCDIPPLLALSCSDTSINEIVMFTFIGCVVGISIVTVLLSYCYIIATICRMNSAEGRHKAFSTCASHLMAVAIFHGTLLFMYFRPSSSYSMDTDKMASVFYTVVIPMLNPLIYSLRNKDVKGALKKAININLWPG

SEQ ID NO: 313 - protein, 312 aa, Artificial Sequence
  Synthetic
MTFENFTMLTEFVFLGLSGRQDVQQGLFALFFLVYGITVIANLGMVILIKLDSRLHTPMYYFLSNLSFCDICYSSTVSPKMLADFLSKEKRIPYNLCAVQMYFFGAFADVECLMLAVMAYDRYVAICNPLLYTIAMSKKLCIQLVAVAYAIGLVDSAIHTSCTFRLSFCNSNVINHFFCDIPPLLALSCSDTSINEIVMFTFIGCVVGISIVTVLLSYCYIIATICRMNSAEGRHKAFSTCASHLMAVAIFHGTLLFMYFRPSSSYSMDTDKMASVFYTVVIPMLNPLIYSLRNKDVKGALKKAININLWPG

SEQ ID NO: 314 - protein, 313 aa, Artificial Sequence
  Synthetic
MQFENFTTVFTEFVLLGLSGRQDVQQGLFALFFLVYGITVIANLGMILLIKLDSRLHTPMYYFLSNLSFCDICYSTIISPKMLADFLSTEKRIPYNLCAIQLYFFGAFADVECLMLAVMAYDHYVAICNPLLYTIKMSKKLCIQLVAVAYAIGLVDSTIHTSCAFRLSFCNSNVINHFFCDLPPLLALSCSDTSINEIVMFTLIGCVVGCSIVTVLLSYCYIIATICRMNSAEGRHKAFSTCASHLMAVAIFYGTLLFMYFRPSSSYSMDTDKMASVFYTVVIPMLNPLIYSLRNKDVKGALKKAININLWPG

SEQ ID NO: 315 - protein, 311 aa, Artificial Sequence
  Synthetic
MTFEIITVFTDFVLLGLSGRQDVQQGLFALFFLVYGITVIANLGMILLIKLDSRLHTPMYYFMSNLSFCDICYSTIISPKMLADFLLKEKRIPCNLCALQMYFLGVFGDTECLILAVMAYDCYVAICNPLLYTTTMSTKLYIQLVAVAYAVGLVDSAVHTSCTFQLSFCNSNVINHFSCDLPPLLALSCSDTSINEILLFIFSTLVIGCSIFHILLSYCYIIATICRMNSAEGRRKAFSTCTSHLMAVAIFHGTLFMYFQPSSLYSMDTDKMASVFYTVVIPMLNPLIYSLRNKDVKGALKKVININLWPG

SEQ ID NO: 316 - protein, 314 aa, Artificial Sequence
  Synthetic
LMKEVRGRNQTEVTEFLLLGLSDNPDLQGVLFALFLLIYMANMVGNLGMIVLIKIDLCLHTPMYFFLSSLSFVDASYSSSVTPKMLVNLMAENKAISFHGCAAQFYFFGSFLGTECFLLAMMAYDRYAAIWNPLLYPVLVSGRICFLLIATSFLAGCGNAAIHTGMTFRLSFCGSNRINHFYCDTPPLLKLSCSDTHFNGIVIMAFSSFIVISCVMIVLISYLCIFIAVLKMPSLEGRHKAFSTCASYLMAVTIFFGTILFMYLRPTSSYSMEQDKVVSVFYTVIIPVLNPLIYSLKNKDVKKALKKILWKHIL

SEQ ID NO: 317 - protein, 313 aa, Artificial Sequence [sequence omitted]

SEQ ID NO: 318 - protein, 314 aa, Artificial Sequence
  Synthetic
TMKGIQDKNATEVTEFILLGLSENPDLQGVLFALFLIIYTMTLVGNLGMMALIKIDRSLHTPMYFFLSSLSFVDASSSSTVTPKMLLNLVAEDKSISFNGCATQFFFFGSFLGTECFLLAMMAYDRYAAIWNPLLYPVLMSGSICFMLVSTSFLAGFGNAAIHTGMTFRLSFCGSNKINHFYCDTPPLLKLSCSDIHINGIVIMAFSSFTVLICVLIVLISYLCILIAILKMPSAEGRHKAFSTCASHLMAVTIFFGSILFMYLRPTTSYSMEQDKIVSVFYTVVIPMLNPLIYSLKNRDVKEAVKKILQKHIL

SEQ ID NO: 319 - protein, 314 aa, Artificial Sequence
  Synthetic
SGKGIQNKNATEVTEFILLGLSDNPDLQGVLFALFLIIYTMTLVGNLGMMALIKIDRSLHTPMYFFLSSLSFVDASYSSSVTPKMLVNLMAEDKSISFNGCATQFFFFGSFLGTECFLLAMMAYDRYAAIWNPLLYPVLMSGRICFMLVSTSFLAGFGNAAIHTGMTFRLSFCGSNKINHFYCDTPPLLKLSCSDTHINGIVIMAFSSFNVISCVLIVLISYLCILIAILKMPSAEGRHKAFSTCASHLMAVTIFFGTILFMYLRPTSSYSMEQDKVVSVFYTVVIPMLNPLIYSLKNKDVKKAVKKILHNYVV

SEQ ID NO: 320 - protein, 297 aa, Artificial Sequence
  Synthetic
FVLDFNMKNVTEVTLFVLKGFTDNLELQTIFFFLFLAIYLFTLMGNLGLILVVIRDSQLHKPMYYFLSMLSSVDACYSSVITPNMLVDFTTKNKVISFLGCVAQVFLACSFGTTECFLLAAMAYDRYVAIYNPLLYSVSMSPRVYMPLINASYVAGILHATIHTVATFSLSFCGANEIRRVFCDIPPLLAISYSDTHTNQLLLFYFVGSIELVTILIVLISYGLILLAILKMYSAEGRRKVFSTCGAHLTGVSIYYGTILFMYVRPSSSYASDHDMIVSIFYTIVIPLLNPVIYSLR

SEQ ID NO: 321 - protein, 323 aa, Artificial Sequence
  Synthetic
FVLDFNMKNVTEVTLFVLKGFTDNLELQTIFFFLFLAIYLFTLMGNLGLILVVIRDSQLHKPMYYFLSMLSSVDACYSSVITPNMLVDFTTKNKVISFLGCVAQVFLACSFGTTECFLLAAMAYDRYVAIYNPLLYSVSMSPRVYMPLINASYVAGILHATIHTVATFSLSFCGANEIRRVFCDIPPLLAISYSDTHTNQLLLFYFVGSIELVTILIVLISYGLILLAILKMYSAEGRRKVFSTCGAHLTGVSIYYGTILFMYVRPSSSYASDHDMIVSIFYTIVIPLLNPVIYSLRNKDVKDSMKKMFGKNQVINKVYFHTK

SEQ ID NO: 322 - protein, 310 aa, Artificial Sequence
  Synthetic
MENVTVSLFILRGLTDNAELQISLFFLFLMIYLFTLMGNIGLISVVIGDSQLHNPMYYFLGVLSFIDTCFSTIITPKMLIDFMSKRKVISFLGCVAQMFLAVSCGTTECFLLAAMAYDRYVAIYNPLLYAVNMSPRVYMSLIIASNVGGILHASIHTAATASLSFCDSNEIKHFFCDIPPLLAISCSDTKMNELLLFIFVSSIEVVTILIIIVSYSFILFAILKMHSAEGRQKVFSTCGSHLTGVSIYYGTIFFMYMRPSSSYTLEHDMIVSTFYAVVIPMLNPIIYSLRNKDVKKAMKRLLAKVFMSIR

SEQ ID NO: 323 - protein, 310 aa, Artificial Sequence
  Synthetic
MENITEVTEFILMGFTDNADLEILSFFLFLAIYLFTLMGNLGLITLVIGDSRLHNPMYYFLSVLSSVDACYSTVITPQMVVDFVSEKKVISFIGCATQMFLAVTFGTTECFLLAAMAYDRYVAIHNPLMYVVSMSPRVYVPLIIASYAGGILHAVIHTVATFRLSFCGSNKISHIFCDIPPLLAISCSDTHFNQLLLFYCAGFIEVVTILIVLLSYGFILSVILKTRSTEGKRKVFSTCGSHLMAVSTFHGTVLFMYVRPSDSYALEHDMMVSIFYSIVIPMLNPLIYSLRNKDVKEAIKKVFGKRILCG

SEQ ID NO: 324 - protein, 308 aa, Artificial Sequence
  Synthetic
MKNITEATFFVLKGLTDNNELQIILFFLFLAIYLFTLIGNVGLIILVVGDPQLHNPMYCFLSALSFVDACYSSDITPNMLVGFMSKSKIISFYGCATQMFLAVTFGTTECFLLAAMAYDRYVAIHDPLLYAVSMSPRVYLPLIIASYAGGIVHAIIHTVATFSLSFCQSNEVKHIFCDIPPLLAISCSETYVNELLLFFFVSFIELVTILIILFSYAFILLSILKMNSAEGRRKVFSTCGSHLTAVSICYGTSLFMYVRPSSNYSLEHDMIVSTFYTIGIPMLNPIIYSLRNKDVKEAIKRVLRKNFI

SEQ ID NO: 325 - protein, 315 aa, Artificial Sequence
  Synthetic
MRNITEATFFVLKGLTDNNELQIILFLLFLAIYIFTLIGNVGLIILVVGDSQLHNPMYCFLSVLSSVDACYSTDITPNMLVGFMSKSKIISFYGCATQMFLAVTFGTTECFLLAAMAYDRYVAIHDPLLYAVSMSPRVYIPLIIASYAGGIVHAIIHTVATFSLSFCRSNEVKHIFCDIPPLLAISCSETYVNELLLFFFVSFIELVTILIVLVSYAFILLSILKMNSSEGRRKVFSTCGAHLTAVSIYYGTILFMYVRPSSNYSLEHDMIVSTFYTIGIPMLNPIIYSLRNKDVKEAMKRVLRKKLILNIELKN

SEQ ID NO: 326 - protein, 313 aa, Artificial Sequence
  Synthetic
MDKLSSGNKTEVTMFILTGFTDDFELQVFLFLLFFAIYLFTLIGNLGLVVLVIEDSWLHNPMYYFLSVLSFLDACYSTVVTPKMLVNFLAKNKSISFIGCATQMLLFVTFGTTECFLLAAMAYDHYVAIYNPLLYSVSMSPRVYVPLITASYVAGILHATIHIVATFSLSFCGSNEIRHVFCDMPPLLAISCSDTHTNQLLLFYFVGSIEIVTILIVLISCDFILLSILKMHSAKGRQKAFSTCGSHLTGVTIYHGTILVSYMRPSSSYASDHDIIVSIFYTIVIPKLNPIIYSLRNKEVKKAVKKMLKLVYK

SEQ ID NO: 327 - protein, 322 aa, Artificial Sequence
  Synthetic
EMDKLSSGNKTEVTMFILTGFTDDFELQVFLFLLFFAIYLFTLIGNLGLVVLVIEDSWLHNPMYYFLSVLSFLDACYSTVVTPKMLVNFLAKNKSISFIGCATQMLLFVTFGTTECFLLAAMAYDHYVAIYNPLLYSVSMSPRVYVPLITASYVAGILHATIHIVATFSLSFCGSNEIRHVFCDMPPLLAISCSDTHTNQLLLFYFVGSIEIVTILIVLISCDFILLSILKMHSAKGRQKAFSTCGSHLTGVTIYHGTILVSYMRPSSSYASDHDIIVSIFYTIVIPKLNPIIYSLRNKEVKKAVKKMLKLVYKERPLEQTD

SEQ ID NO: 328 - protein, 317 aa, Artificial Sequence
  Synthetic
MSGLPSDNFTEVTMFILISFTEEFDVQVFLFLLFLAIYLFTLIGNLGLVVPIIGDFWLHSPMYYFLGVLSFLDVCYSTVVTPKMLVNFLAKNKSISFLGCATQMFLACTFGTTECFLLAAMAYDRYVAIYNPLLYSVSMSPRVYVPLITASYVASILHATIHTVATFSLSFCGSNEIRHVFCNMPPLLAISCSDTHVIQLLFFYFVGSIEIVTILIVLISYGFILLAILKMQSAEGRRKVFSTCGAHLTGVTIYHGTILFMYVRPSSSYTSDNDMIVSIFYTIVIPMLNPIIYSLRNKDVKEAIKRLLVRNWFINKL

SEQ ID NO: 329 - protein, 317 aa, Artificial Sequence; identical to SEQ ID NO: 328
  Synthetic

SEQ ID NO: 330 - protein, 313 aa, Artificial Sequence
  Synthetic
MEKITSANMTEATMFILLGFTDDFELQVFLFLLFLAIYLFTLVGNFGLVVLVIGDCRLHNPMYYFLSVLSFLDACYSTVVTPKMLVNFLSENKSISFLACATQMLLFVSLGTTECFLLAAMAYDRYVAIYNPLLYTVAMSPRVYLPLIIASYAGGVVHGAIHTVATFSLSFCGSNEIKHVFCDIPALLALSCSDTHTNELLVLYLVGLIEIVTILIVLVSYGFILFAILNMHSAEGRRKVFSTCGSHLTGVSIYHGTILFTYMRPSSSYASNHDMVVSIFYTIVIPMLNPIIYSLRNKDVKVAFNKLWRKCDS

SEQ ID NO: 331 - protein, 322 aa, Artificial Sequence
  Synthetic
TVRRIPVNNVTDTTMFILTGFTDDADLQVLLFLLFFVIYLFTLIGNLGLVLLVIGDSRLHNPMYYFLSVLSFLDACYSTVVTPKMLVNFISNDKSISYPGCVTEMFLFVTFGTTECFLLAAMAYDRFVAIYNPLLYAVKMSPRVYIPLIIACYSGGIMHATIHTVATFSLSFCASNEIRHVFCDIPPLLAISCSNTNINQLLLFYCVGSIEIITILIVLVSYSFILFAILKMNSAEGRRKIFSTCGSHLTGVSIYHGTILFMYVRPSSNYALEHDMIVSTFYTIVIPMLNPIIYSLRNKDVKEAMKKIFERNFFMNKVHFKL

SEQ ID NO: 332 - protein, 316 aa, Artificial Sequence
  Synthetic
NTKTTQVNNVTEITVFILLGFTDDVDMNIFLFILFLAIYVVTLIGNLGLVVLVIEDSRLHNPMYYFLTVLSSLDACFSSVLTPKMLVNFLSKNKSISFAGCATQMLLFVTFGTTECFLLAAMAYDRYLAIYSPLLYAVRMSPRVYVPLIIASYTGGILHATIHTVATFSLSFCGSNEIRHVFCDIPPLLALSCSDTHLNQLLLFYCAGSIELITILIVLVSYGFVLLAILKINSAEGRRKIFSTCGAHLTGVSIFHGTILFMYVRPSSNYTLEQDMVVSTFYTIVIPMLNPIIYSLRNKDVKEAMRKLLKRKLVHE

SEQ ID NO: 333 - protein, 311 aa, Artificial Sequence
  Synthetic
MKGANLSQGMEFELLGLTTDPQLQRLLFVVFLGMYTATLLGNLVMFLLIHVSATLHTPMYSLLKSLSFLDFCYSSTVVPQTLVNFLAKRKVISYFGCMTQMFFYAGFATSECYLIAAMAYDRYAAICNPLLYSTIMSPEVCASLIVGSYSAGFLNSLIHTGCIFSLKFCGAHVVTHFFCDGPPILSLSCVDTSLCEILLFIFAGFNLLSCTLTILISYFLILNTILKMSSAQGRFKAFSTCASHLTAICLFFGTTLFMYLRPRSSYSLTQDRTVAVIYTVVIPVLNPLMYSLRNKDVKKALIKVWGRKTME

SEQ ID NO: 334 - protein, 311 aa, Artificial Sequence
  Synthetic
MERTNVSHEMEFELLGLTSDPQLQKLLFVVFLVMYAITVLGNLVMFFLIHVSTTLHTPMYSLLKSLSLLDFCYSSTVVPQTLINFLVERKVISYFGCMAQMFFFAGFATSECYLIAAMAYDRYVAVCSPLLYPTIVSPNVCASLIGGSYGAGFLNSLIHTSCIFSLNFCGAHVVTHFFCDGPPILSLSCVDTSLCEILLFIFAGFNLLSCTLTILISYLLIFIAILQIRSNQGRFKAFSTCSSHLTAVCFFFGTTLFMYLRPKSSYSLTQDRTVAVIYTAVIPMLNPLIYSLRNKDVKEALRKVWGWKSMG

SEQ ID NO: 335 - protein, 311 aa, Artificial Sequence
  Synthetic
MERTNLSHEMEFELLGLTSDPQLQKLLFVVFLVMYAITVLGNLVMFFLIHVSTTLHTPMYSLLKSLSLLDFCYSSTVVPQTLLNFLVERKVISYFGCMAQMFFFAGFATSECYLIAAMAYDRYVAVCSPLLYPTIVSPNVCASLIGGSYGAGFLNSLIHTSCIFSLNFCGAHVVTHFFCDGPPILSLSCVDTSLCEILLFIFAGFNLLSCTLTILISYLLIFIAILQMRSNQGRFKAFSTCSSHLTAVCFFFGTTLFMYLRPKSSYSLTQDRTVAVIYTAVIPMLNPLIYSLRNKDVKEALRRVWGWKAMG

SEQ ID NO: 336 - protein, 319 aa, Artificial Sequence
  Synthetic
MTSMENITEVTEFILLGLTDDPNLQVPLLLIFLFIYLVTLIGNGGMMVIIFSDSHLHTPMYFFLSNLSFVDLGYSSAVAPKMVAALQSGNKVISYNGCAAQFFFFVGFATVECYLLASMAYDRHAAVCRPLHYTTTMTTGVCTILTIGSYTCGFLNASIHAADTFKLSFCGSNKINHFFCDIPPLLALACSSTHISKLVVFFVVGFNVFFTLLVIIISYFFIYIAIQNMKSSEGRKKAFSTCASHLTAVSIFYGTIIFMYLQPSSGQSMDTDKIASVFYTVVIPMLNPLIYSLRNREVKSALWKILNRFYPASFSVSRK

SEQ ID NO: 337 - protein, 309 aa, Artificial Sequence
  Synthetic
MENSTEVTEFILLGLTDDPNLQIPLLLAFLFIYLITLLGNGGMMVIIHSDSHLHTPMYFFLSNLSLVDLGYSSAVAPKTVAALRSGDKAISYDGCAAQFFFFVGFATVECYLLASMAYDRHAAVCRPLHYTTTMTAGVCALLATGSYVSGFLNASIHAAGTFRLSFCGSNEINHFFCDIPPLLALSCSDTRISKLVVFVAGFNVFFTLLVILISYFFICITIQRMHSAEGQKKVFSTCASHLTALSIFYGTIIFMYLQPNSSQSVDTDKIASVFYTVVIPMLNPLIYSLRNKEVKSALWKILNKLYPQY

SEQ ID NO: 338 - protein, 314 aa, Artificial Sequence
  Synthetic
MENSTEVTEFILAGLTDDPKLQIPLFIVFLLIYLSTVLGNLGMVGLILLDSHLHTPMYLFLSHLSLVDFGYSSAVTPKVMSGLLSIDKTISHNTCGTQFFFFVGFITTESFLLAAMAYDRYAAVCKPLHYTTTMTTNTCACLTIGSYVCGFLNSSIHTGNIFRLSFCKFNVIDHFFCDAPPLLALSCSDTYISETVIFFVVGFNALFSIVVITISYLLIFITILRMRSSEGRHKAFSTCASHLTAVSIFYGTVIFMYLQPSSSHTMGTDKMASVFYTMVIPMLNPLVYSLRNKEVKGAFKKAVGNAKSALTFLF

SEQ ID NO: 339 - protein, 314 aa, Artificial Sequence
  Synthetic
MENSTEVTEFILTGLTDNPELQIPLFIVFLLIYLSTVLGNLGMVGLILLDSHLHTPMYLFLSHLSLVDFGYSSAVTPKVMPGLLSIDKTITHNACGTQFFFFVSFITTESFLLAAMAYDRYAAVCKPLQYTTTMTTNTCACLTIGSYVCGVLNSSIHTGNIFRLSFCKFNVIDHFFCDAPPLLALSCSDTSVSEMVILFVVGFNDIFSIVVIPISYLFIFITILRMRSSEGRQKAFSTCASHLTVVFIFYGSGIFMYLQPSSSHTMGTDKMASVFYTMIIPMLNPLVYSLRNKEVKSAFKKAVEKAKISLAFTF

SEQ ID NO: 340 - protein, 314 aa, Artificial Sequence
  Synthetic
MENNTEVTEFILVGLTDDPELQIPLFIVFLFIYLITLVGNLGMIELILLDSCLHTPMYFFLSNLSLVDFGYSSAVTPKVMVGFLTGDKFILYNACATQFFFFVAFITAESFLLASMAYDRYAALCKPLHYTTTMTTNVCACLAIGSYICGFLNASIHTGNTFRLSFCRSNVVEHFFCDAPPLLTLSCSDNYISEMVIFFVVGFNDLFSILVILISYLFIFITIMKMRSPEGRQKAFSTCASHLTAVSIFYGTGIFMYLRPNSSHFMGTDKMASVFYAIVIPMLNPLVYSLRNKEVKSAFKKTVGKAKASIGFIF

SEQ ID NO: 341 - protein, 314 aa, Artificial Sequence
  Synthetic
MENKTEVTQFILLGLTNDSELQVPLFITFPFIYIITLVGNLGIIVLIFWDSCLHNPMYFFLSNLSLVDFCYSSAVTPIVMAGFLIEDKVISYNACAAQMYIFVAFATVENYLLASMAYDRYAAVCKPLHYTTTMTTTVCARLAIGSYLCGFLNASIHTGDTFSLSFCKSNEVHHFFCDIPAVMVLSCSDRHISELVLIYVVSFNIFIALLVILISYTFIFITILKMHSASVYQKPLSTCASHFIAVGIFYGTIIFMYLQPSSSHSMDTDKMAPVFYTMVIPMLNPLVYSLRNKEVKSAFKKVVEKAKLSVGWSV

SEQ ID NO: 342 - protein, 314 aa, Artificial Sequence; identical to SEQ ID NO: 341
  Synthetic

SEQ ID NO: 343 - protein, 309 aa, Artificial Sequence
  Synthetic
MSLMENNTDVTQFLLLGLTDDPGLQFPLFITFLLIYTITLVGNLGMILLIVLDSRLHTPMYFFLGNLSLVDFCYSSAVTPTVMTGLIGEKIISYNDCAAQMFFFVAFATVENYLLASMAYDRYAAVCKPLHYATTMTANVCICLCIGSYTCGFLNASIHIGDTFSLSFCRSNVVHHFFCDIPAVMVLSCSDRHVSELVLVYVVSFNIFFALSVIWISYIFIFITICKMHSSSGYRKAISTCASHFIAVSIFYGTIIFMYLQPSSSHSMDTDKIASVFYTMIIPMLNPLVYSMRNKEVKSAFTKVLQVAK

SEQ ID NO: 344 - protein, 317 aa, Artificial Sequence
  Synthetic
MSLMENNTKVTEFLLLGLTNDPELQLPLFLIFLLIYTITLVGNLGLILLIVLDSCLHTPMYIFLGNLSLVDFCYSSAVTPSVMTELLIGKKVISYNDCAAQTFFFVAFCTVENYLLASMAYDRYAAVCKPLHYASTMTTRVCIYLSIGSYVCGFLNASINTGNTFSLFFCRYNMIHHFFCDIPAVMVLSCSDRYFSELLLVYVVSFSIFFALLVICISYIFIFITIAKMHSSAGYGKAAPTCASHFTAVSIFYGTVIFMYLLPSSSHSMDTDQIASVFYTMIIPMLNPLVYSLRNKEVKSAFTKIFQVAKQSVMLYF

SEQ ID NO: 345 - protein, 307 aa, Artificial Sequence
  Synthetic
MENNTEVTHFLLLGLTDDPELQLPLFMILLIIYTITLVGNLGKILLIFLDSCLHTPMYFFLGNLSLVDFCYSSDVTPKVMSGLLKGDKVISYNGCAAQMFFFVAFATVENFLLASMAYDRYAAVCKPLHYATTMTSGVCVCLSIGSYACGFLIASIHIGDTFNLSFCRSNVVHHFFCDIPAVMILSCSDRHVSELVLFYVGSFSIFFSVLVICISYIFIFITIFKMHSDAGYGKAVSTCAAHFTAVSIFYGTGIFMYLQPSSSHSMDTDKITSVFYTMIIPMLNPLVYSMRNKEVKRAFTNVFHKAK

SEQ ID NO: 346 - protein, 310 aa, Artificial Sequence
  Synthetic
MTSLNNLTEVTHFLLLGLTDDPGLQLPLFIIFLLIYIITLVGNLGMILLILLDSRLHIPMYFFLANLSLVDVIYSSAVTPKVMAGLIIGDNLISYNECAAQMFFFAAFATVENYLLTSMACDRYAAVCKPLYYATTMTPSVCMCFIMGCYALGFLNASVYLGNTFSLSFCKSNVVHHFFCDMPAIMALSCSDRHVNELVLIYQASFIIFFALIIILISYIIIFITILKMHSEAGVQKALSTCASHFTAVFIFYGTTIFMYLQPSSRHAMDTDKIVSVFYTMVIPMLNPLVYSLRNKEVKSAFMKVVLKEK

SEQ ID NO: 347 - protein, 310 aa, Artificial Sequence
  Synthetic
MTPLKNWTEVTHFLLLGLTDDPGLQLPLFIIFLLIYIFTLVGNLGLILLILLDSRLHTPMYFFLGNLSLVDVFYSSAITPKVMAGLLLGDKIISYNSCAAQMFVFATFATVENYLLASMAYDRYAAVCKPLHYATTMTPSVCMCLIMGCYVLGFLSVSVYLGDTFSLSFCKSNVVHHFFCDMPALMALSCSDRHINELVLIYLASFTLFFALIIILVSYTIIFITILNMHTGAGLQKAISTCASHFIAVFIFYGTTIFMYLQPSSRHSMDTDKIVSVFYTMVIPMLNPLVYSLRNKEVKSAFMKWILKEK

SEQ ID NO: 348 - protein, 312 aa, Artificial Sequence
  Synthetic
MTLVKNWTYVTEFILLGLTDDPGLQLPLFVIFLLIYIITLVGNLGMILLIFLDSQLHIPMYFFLGNLSLVDVCYSSAVTPKVIAGLLIGDKFISYNDCAAQMFFFAAFATVENYLLASMAYDRYVAVCKPLHYTTTMTSNVCICLIMGCYGFSFLNVSVYLGDTFSLSFCNSNVVHHFFCDMPAIMALSCSDKHVNELVLIYLASFNIFVAFIMIIVSYLIIFITILNMRSRAGVQKALSTCVSHLTAVFIFYGTIIFMYLQPSSRHAMDTDKIVSVFYTMVIPMLNPLVYSLRNKEVKSAFMKIVLKEKSL

SEQ ID NO: 349 - protein, 308 aa, Artificial Sequence
  Synthetic
MTIMKNRTEVTEFILLGLTNDPGMQLPLFITFLLIYTITVVGNLGMILLIVLDSRLHTPMYIFLGNLSLVDFCYSSAVTPTVMTELLIGKKVISYNDCAAQMFFFGAFATVENYLLASMAYDRYAAVCKPLHYATIMTKSVYTRIITASYGISFMSASIHIADIFTLSFCKSNVIHHFFCDVPAIMALTCFDNQVRELVLLYIESLDVFFALIVICTSYMLIFVTILKMHSASGHHKAISTCASHFTAVSIFYGTVIFMYLQPSSNHSMDIDKVTSVFYTMVIPMLNPLVYSMRNKEVKNAFIKLILH

SEQ ID NO: 350 - protein, 309 aa, Artificial Sequence
  Synthetic
MTIMKNRTEVTEFILLGLTNDPGLQLPLFITFLLIYTITVVGNLGMILLIVLDSRLHTPMYIFLGNLSLVDFCYSTAVTPTVMNGLLIGNKVISYNDCAAQMFFFGAFATVENYLLASMAYDRYAAVCKPLHYATIMTKSMYTWLITGSYVISFTNSSIHIADIFTLSFCKSNVIHHFFCDVPAIMALTCFDNQVREHVLLYIESLNVFFALIVICTSYMLIFVTILKMHSASGHHKAISTCASHFTAVSIFYGTVIFMYLQPSSNHSMDTDKVTSVFYTMVIPMLNPLVYSLRNKEVKNAFIKLILHY

SEQ ID NO: 351 - protein, 307 aa, Artificial Sequence
  Synthetic
MENRTEVRCFILVGLTNDPSLQLPLSITFLLIYIITLIGNLGLILMILLDSRLHTPMYIFLGNLSLVDFCYSSTVTPKVIAGFLTGDKIMSYNACASQMFFFANFGDVENYLLASMAYDRYVAVCKPLHYATTMTTHMCASLVIGCYICGFLSASIYTMDALSLSFCESNVIHHFFCDVLAVMIVSCSDSHVNELILIYVVSFNMFFALIIILISYMFIFTNILKIHSSAGYHKAVSTCASHFTAVSIFYGTIIFMYLQPSSSHTMDTDKIASVFYTMVICMLNPLVYSLRSKDVKSAFTKIVLRSK

SEQ ID NO: 352 - protein, 307 aa, Artificial Sequence; identical to SEQ ID NO: 351
  Synthetic

SEQ ID NO: 353 - protein, 307 aa, Artificial Sequence
  Synthetic
MENRTEVRCFILVGLTNDPGLQLPLFITFLLIYIITLIGNLGLILLILLDSRLHTPMYIFLGNLSLVDFCYSSTVTPKVIAGFLMGDKIMSYNACASQMFFFANFADVENYLLVSMAYDRYVAVCKPLHYATTMTTHMCVCLLIGCYICGFLNASIYTVDALSLSFCESNVVHHFFCDVLAVMIISCSDRHVNELIFVYVASFNIFFALILIIISYTFIFTNILKLQSAAGYRKAFFTCASHFTAVSIFYGTIIFMYLQPSSSHSMDTDKIASVFYTMVIPMLNPLVYSLRNKDVKSAFTKIILRSG

SEQ ID NO: 354 - protein, 307 aa, Artificial Sequence
  Synthetic
MENRTEVTWFILVGLTNDSQLQLPLFITFLLIYTVTFVGNLGLILLILLDSRLHTPMYIFLSNLSLVDFCYSSTITPKVIAGILTGDKIMSYNACASQMFFFANFANVENYLLVSMAYDRYAAVCKPLHYATTMTKRVCASLVIGCYICGLLNASIYTMDALSLSFCESNVVHHFFCDVLAIMTTSCSDRHVNELILVYLASFNVFFALILILISYMFIFTNILKMHSASGYCKAISTCASHLTAVFIFYGTIIFMYLQPSSHHSMDTDKIASVFYTMIIPMLNPLVYSLRNKDVKSAFTKIVLRSG

SEQ ID NO: 355 - protein, 307 aa, Artificial Sequence
  Synthetic
MENTTEVTWFVLLGLTNDPQLQLPLFITFLLIYIITLVGNLGIILLILLDSRLHTPMYIFLSNLSLVDFCYSSTITPKVMAGFLTGDRIISYNACASQMFFFAHFADVESYLLVSMAYDHYVAVCKPLHYATTMTTHLCVFLVIGCYICGFLNASIYTVDVFSLSFCESNVIHHFFCDVLAVMIISRSDKYINELVLISVASFNIIFSLILILISYMFIFTNILKINSSEGYRKALSTCTSHFTAVFIYYGTVIFMYLQPTSSHSMDTDKIVSVFYSIVIPMLNPLVYSMRNKEVKNAFTKVVLRSR

SEQ ID NO: 356 - protein, 312 aa, Artificial Sequence
  Synthetic
MENRTEVTEFILLGVTNAPALQTPLFILFTLIYFINMTGNLGMLVLILWDSRLHTPMYIFLGNLSLVDIFYSSAVTPTVVAGLLVGNQAISYNACAAQMFLFVVFATAENFLLAAMAYDRYAAVCKPLHYTTTMTPTTCACLTMACYAGGFLNSSIHTGDTFRLYFCKSNVVHHFFCDVPAVMVLSCSDRHISEMVLLYGASFVICSALLVILISYIFIFITIFKMRSAAGYQKAMSTCVSHFTAVSIFYGTLIFMYLQPSSSHSMDTDKIVSVFYTMVIPMLNPVVYSLRNKEVKSAFKKVVEKAKYTLGF

SEQ ID NO: 357 - protein, 312 aa, Artificial Sequence
  Synthetic
MENRTEMTGFILLGLTNAPELRAPLFIIISFIYFTNVIGNLGMIVLILWDSRLHTPMYCFLANLSLVDIFYSSAVAPTILAGLLVGNIVVSYNACVAQMISFSAFVTTEDLLLAAMAYDRYAAVCKPLHYTTIMTPTVCICLIMACYTGGFLNSSIHTGDTFRLSFCGSNAVHHFFCDVPAVMTLSCSDRHVSEIVLIYGAGFIICSALLVILISYTFIFITIFRMRSAAGYQKAMSTCVSHFTAVSIFYGTVIFMYLQPTSSHSMDTDKTVSVFYTMVIPMLNPMVYSLRNKEVKSAFKKVVEKAKYSLGF

SEQ ID NO: 358 - protein, 309 aa, Artificial Sequence [sequence omitted]

SEQ ID NO: 359 - protein, 309 aa, Artificial Sequence
  Synthetic
MENCTEVTKFILLGLTSVPELQIPLFILFTFIYLLTLCGNLGMMLLILMDSCLHTPMYFFLSNLSLVDFGYSSAVTPKVMAGFLRGDKVISYNACAVQMFFFVALATVENYLLASMAYDRYAAVCKPLHYTTTMTASVGACLALGSYVCGFLNASFHIGGIFSLSFCKSNLVHHFFCDVPAVMALSCSDKHTSEVILVFMSSFNIFFVLLVIFISYLFIFITILKMHSAKGHQKALSTCASHFTAVSVFYGTVIFIYLQPSSSHSMDTDKMASVFYAMIIPMLNPVVYSLRNREVQNAFKKVLRRQKFL

SEQ ID NO: 360 - protein, 310 aa, Artificial Sequence
  Synthetic
MENCTKVREFILLGLTDDPGLQVSLCIMFTLIYLIDVVGNTGLIMLVLMDSHLHTPMYFFLCNLSFVDLGYSSAVTPMVISEFFIVSKVVSYNACAAQMFFFVGFATGENYLLASMAYDRYVAVCKPLHYSTRMTTSVCICLNIVSYICGFLNAIFHVGDIFSLSFCKSNVVHHFFCDVPAVLALSCSDIHLSEVILVFLSTFNVFFALLIISVSYLFIFITVLKMKSDQGHQKALSTCASHLTVVSIFYSTVIFMYLQPSSSHSMDADKVASMFYTMIIPTLNPLVYSLRNKEVNNAFKKVVERAKIFM

SEQ ID NO: 361 - protein, 310 aa, Artificial Sequence; identical to SEQ ID NO: 360
  Synthetic

SEQ ID NO: 362 - protein, 314 aa, Artificial Sequence
  Synthetic
MENNTEVSEFILLGLTNAPELQVPLFIMFTLIYLITLTGNLGMIILILLDSHLHTPMYFFLSNLSLAGIGYSSAVTPKVLTGLLIEDKAISYSACAAQMFFCAVFATVENYLLSSMAYDRYAAVCNPLHYTTTMTTRVCACLAIGCYVIGFLNASIQIGDTFRLSFCMSNVIHHFFCDKPAVITLTCSEKHISELILVLISSFNVFFALLVTLISYLFILITILKRHTGKGYQKPLSTCGSHLIAIFLFYITVIIMYIRPSSSHSMDTDKIASVFYTMIIPMLSPIVYTLRNKDVKNAFMKVVEKAKYSLDSVF

SEQ ID NO: 363 - protein, 314 aa, Artificial Sequence; identical to SEQ ID NO: 362
  Synthetic

SEQ ID NO: 364 - protein, 314 aa, Artificial Sequence
  Synthetic
MENISEVTEFILMGITDAPELQIPLFIIFTLIYLIALFGNLGMIMLILLDSRLHTPMYFFLCNLSLVDCVYASAVTPKVMEGFLTGNKIISYNACAAQMFFFVAFIAIESLILASMAYDRHAAVCNPLHYTTIMTSTTCILIVTCCYMCGILQSSIHVALAFCLSFCNSNVINHFFCDIPPLLEISCSDTYTNEITVLILGTCDGILTLLVILNTYLLIFIAILRMRSVEAQRKAFSTCASHLITVSIFFGSTLFMYLQPSSNHSMNTDKIASVFYTMVIPMLNPVVYSLRNKEVKNAFKKVVGKLMTSLQLVN

SEQ ID NO: 365 - protein, 314 aa, Artificial Sequence
  Synthetic
MENISEVTEFILVGITDAPELQIPLFIIFTLIYLIALFGNLGMIMLILLDSRLHTPMYFFLCNLSLVDCVYASAVTPKVMEGFLTGNKIISYNACAAQMFFFVAFIAIESLILASMAYDRHAAVCNPLHYTTIMTSTTCILIVTCCYMCGILQSSIHVALAFCLSFCNSNVINHFFCDIPPLLEISCSDTYTNEITVLILGTCDGILTLLVILNTYLLIFIAILRMRSVEAQRKAFSTCASHLITVSIFFGSTLFMYLQPSSNHSMNTDKIASVFYTMVIPMLNPVVYSLRNKEVKNAFKKVVGKLMTSLQLVN

SEQ ID NO: 366 - protein, 314 aa, Artificial Sequence
  Synthetic
MENISEVTEFILVGLTDAPELQIPLFIIFTLIYLIALFGNLGMIILILLDSRLHTPMYFFLCNLSVVDCVYASAITPKVIEGFLTGSKTISLNGCAAQMFFFVAFGAIESLILASMAYDRHAAVCKPLHYTTIMTSTTCILIVTWCYTCGILQSSVHVALAFSLSFCHSNVINHFFCDIPPLLDISCSDTHTNEITLLVLATLDLVFTLLVILNTYLLIFIAILRMRSAEAQRKAFSTCASHLITVSIFFGSLIFMYLQPSSNHSMDTDKIASVFYTMVIPMLNPVVYSLRNKEVKNAFKKVVERLMSSFHLVH

SEQ ID NO: 367 - protein, 315 aa, Artificial Sequence
  Synthetic
MMQNISELSEFILVGLTDAPFLQTPLFIIFTLIYLTTLFGNLGMIMLILLDSRLHTPMYFFLSNLSLVDCVYASAVTPKVMEGFLTGNKIISYNACAAQMFFFVAFAITENFILASMAYDRHAAVCKPLHYSTTMTTTICVLLLVGSYLSGLLHSSIHVSFTFHLSFCRSNVVNHFFCDIPPLLAVSCSSIRTNEIILFMLAGFDVAFSLLVILTSYLLISVAIVRMRSAESRKKAISTCASHLTTVSIFYGTIIFMYLQPSSNHSMDTDKMASVFYTMVIPMLNPLVYSLRNKEVKNAFKKVAGKAVLSLGLIN

SEQ ID NO: 368 - protein, 315 aa, Artificial Sequence
  Synthetic
MMQNISELSEFILLGLTDAPFLQTPLFIIFTLIYLTTLFGNLGMILLILLDSRLHTPMYFFLSNLSLVDCVYASAVTPKVIEGFLTENKIISYNACAAQMFFFVAFAITECFILASMAYDRHAAVCKPLHYSTTMTTTICVLLLAGSYLSGLLQSSIHVSFTFHLSFCRSNVVNHFFCDIPPLLALSCSSIHINEIILFMLAGFNVVFSLLVILTSYLLISVAIVRMRSAESRKKAISTCASHLTTVSIFYGTIIFMYLQPSSNHSMDTDKMASVFYTMVIPMLNPLVYSLRNKEVKNAVRKVAGKALFSLGLVN

SEQ ID NO: 369 - protein, 315 aa, Artificial Sequence
  Synthetic
MIQNISELSEFILVGLTDAPFLQIPLFIIFTLIYLTTLFGNLGMILLILLDSRLHTPMYFFLSNLSLVDCVYASAVTPKVMEGFLTGNKIISYNACAAQMFFFAAFATVESFMLASMAYDRHAAVCKPLHYSTTMTTTICVLLLAGSYVSGLLQSSIHVSFTFQLSFCHSNVVNHFFCDIPPLLALSCSSIHTNEIILFMLAAFNVAFTLLVILSSYLLIFVAILRMRSAESRKKAISTCASHLTTVSIFYGTIIFMYLQPSSNHSMDTDKMASVFYTMVIPMLNPLVYSLRNKEVKNAFKKVAGKAVLSLGLVN

SEQ ID NO: 370 - protein, 315 aa, Artificial Sequence
  Synthetic
MIQNISELSEFILVGLTDAPLLQTPLFIIFTLTYLTTLFGNLGMILLILLDSRLHTPMYFFLSNLSLVDCVYASAVTPKVMEGFLIENKIISYNACAAQMFFFVAFVITESFILASMAYDRYAAVCKPLHYSTTMTTMICVLLLAGSYVSGLLQSSIHVSFTFQLSFCHSNVVNHFFCDIPPLLALSCSSIYTNEIILFMLAAFNVAFTLLVILSSYLLIFVAILKMRSAESRKKTISTCASHLTTVSIFYGTIIFMYLQPSSNHSMDTDKLASVFYTMVIPMLNPLVYSLRNKEVKNAFKKVAGKAVLSLGLVN

SEQ ID NO: 371 - protein, 313 aa, Artificial Sequence
  Synthetic
MHNISEVTEFILVGLTDAPGLQVPLFIIFTFIYLTTLFGNLGMIVLILLDSSLHTPMYFFLSNLSLVDCVYASAVTPKVIEGFLTEKKIISYNACATQMFFLIGFAIIEGFLLASMAYDRHAAVCKPLYYSTSMTTTICTLLIVGSYISGLLQSSIHVAFTFHLSFCHSNVVNHFFCDIPPLLALSCSSVYINEIVLFILAALNIALTILVIVNSYVLIFVAILRMRSTDGQKKAISTCASHLTTVSIFYGTIIFMYLQPSSTHSMDTDKVASVFYTMIIPMLNPLVYSLRNKEVKNAFKKVTRKVLFSLGLV

SEQ ID NO: 372 - protein, 319 aa, Artificial Sequence
  Synthetic
MYVANSSRMNAFILLGLTDNPDLEAPLFIIFNLIYLITLIGNLGMIVLIWFDSHLHTPMYIFLSHLSLADCVYSSAVTPKVMVGLLTGDKVISYGGCVAQMFFFVTFASVDCFLLAVMAFDRHAAVCKPLHYTTNMTTSVCACMVIACYVFSLAESSVYTGFIFDLSFCHSNVIHHFFCDIPPILNLSCSDIYTNEIVLFIITSFNVFFSLIVILTSYAFIFIAILRMHSAEGRKKASSTCASHLTAVTIFYGTIIFMYLQPSSSHSMDNDQMASVFYTTVVPMLNPVVYSLRNKEVHSAFKKAIEKLKSAQHQVLIRD

SEQ ID NO: 373 - protein, 314 aa, Artificial Sequence
  Synthetic
MSYLENSTKVTTFILLGLTDIPELQVPLFVTFSLIYLITLIGNLGIIVLIWLDFRLHTPMYIFLSHLSLADCVYSSAVTPKVMVGFLTGDKVISYGGCVAQMFFFVAFASVDCFLLAVMAFDRHAAVCKPLHYTTTMTTSVCARMVIACYSWGLFESAIHTGFTFSLPYCANVVHHFFCDIPPILALSCSDIYVNEIVLFILASFNVFFALIVILTSYAFIFIAILRMHSAEGRKKAFSTCASHLTAVTIFYGTVIFMYLQPSSSHSMDNDQMASVFYTTIVPMLNPVVYSLRNKEVHNAFKKVVEKMNTLLNS

SEQ ID NO: 374 - protein, 319 aa, Artificial Sequence
  Synthetic
MAEGNSSTVFQFILEGLTDDPELEVTLFAVFLVIYLTTVLGNLGLIMLIQVSPQLHTPMYFFLCHLAFVDFCYTSSVTPNTIINFLREIKSITFYACATQVCCFITFAVCEMYLLSVMAYDRYVAIWNPLLYVVLMPKKLCLQVITSTYIYGFTVGLAQAVATFRLSFCGSNVINHFYCDDVPLVALACSDTHVKELMLLIIAGFNTLCSLVIVVISYICILFAILRIHSAEGRRKAFSTCASHLTSITIFYGTIIFMYLQPKSSHSLNTDKFVSVFYVVVIPMLNPLIYSLRNKEVKNALKRFTEKLSLTIHDSRKSE

SEQ ID NO: 375 - protein, 313 aa, Artificial Sequence
  Synthetic
MDEDNNSTVHQFILVGLTDDPELEVILFAVFLVIYLTTVLGNLGLIMLIQVSPQLHTPMYFFLCHLAFVDFCYTSSVTPSTIINFLREIKSITFYACATQVCCFITFVVCEMYLLSVMAYDRYVAIWNPLLYVVLMPKKLCLQVIASTYIYGFTVGLVQAVATFHFSFCGSNVINHFYCDDVPLIALACSDTHVKELMLLIIAGFNTLCSLVIVVISYICILFAILRIRSVEGRRKAFSTCASHLTSITIFYGTVSFMYLQPKSSHSLNTDKFASVSYVVVIPMLNPLIYSLRNQEVKSALKRITDKLSLTIH

SEQ ID NO: 376 - protein, 313 aa, Artificial Sequence
  Synthetic
MANSNHSAVSEFILVGLTDDSELQVSLFGVFLVIYLTSVVGNVGLIVLIQVSPQLHTPMYFFLTHLAFIDFCFTSSVTPNTLVNFLREVKSITFYACATQLCCFVTFVVCELYLLSIMAYDRYVAIWNPLLYAVRMPRELCLQVITSTYIYGFTVGLAQAVATFRLSFCGSNVINHFYCDDVPLVALACSDTHVKELMLLIIAGFNTLCSLVIVVISYICILFAILRIHSAEGRRKAFSTCASHLTSITIFYGTVSFMYLQPKSSHSLNTDKFASVFYVVVIPMLNPLIYSLRNQEVKSALKRIVEKLSSAIK

SEQ ID NO: 377 - protein, 314 aa, Artificial Sequence
  Synthetic
MAKSNHSVVTEFILLGLTEDPELQIILFVILLIIYLFSVMSNLGLVVLIQISPQLQSPMYFFLSHLAFVDFCYTSCVTPNALVNFLREIKSISFYGCAAQVCFFTTFSVCEVFLLSVMAYDRYVAICNPLLYVILMPRRLCIQIAITTYIYAFVTALIQTVTTFILSFCDSNLVNHFFCEDIPLMALACSNTQVKELLLLSMAGFNVCCSLLIVLISYLFIVSAILKKHSGEGRQKVFSTCASHLSSIAIYYGTIIFMYLQPESSHSLNTDKFAAVFYVVVIPMLNPLIYSLRNTEVKNALKKSIDNIPINISK

SEQ ID NO: 378 - protein, 319 aa, Artificial Sequence
  Synthetic
MAEVNIIYVTVFILKGITNRPELQAPCFGVFLVIYLVTVLGNLGLITLIKIDTRLHTPMYYFLSHLAFVDLCYSSAITPKMMVNFVVERNTIPFHACATQLGCFLTFMITECFLLASMAYDCYVAICSPLHYSTLMSRRVCIQLVAVPYIYSFLVALFHTVITFRLTYCGPNLINHFYCDDLPFLALSCSDTHMKEILIFAFAGFDMISSSSIVLTSYIFIIAAILRIRSTQGQHKAISTCGSHMVTVTIFYGTLIFMYLQPKSNHSLDTDKMASVFYTVVIPMLNPLIYSLRNKEVKDASKKALDKGCENLQILTFLK

SEQ ID NO: 379 - protein, 314 aa, Artificial Sequence
  Synthetic
MAQINCTQVTEFILVGLTDREELKMPLFVVFLSIYLFTTLGNLGLILVIRTDARLHTPMYFFLSNLAFVDFCYSSVITPKMLGNFLYKQNMISFNACAAQLGCFLAFMTAECLLLASMAYDRYVAICNPLLYMVLMSPGICFQLVAAPYSYSFLVALFHAILTFRLCYCHSNAINHFYCDDMPLLRLTCSDTHSKQLWIFVCAGIMFISSLLIVFISYTFIISAILRMRSAEGRRKAFSTCGSHMLAVTIFYGTLIFMYLQPSSNHSLDTDKMASVFYTVIIPMLNPLIYSLRNKEVKDALKKLIASKNQMLSS

SEQ ID NO: 380 - protein, 313 aa, Artificial Sequence
  Synthetic
ARKDMAHINCTQATEFILVGLTDHQELKMPLFVLFLSIYLFTVVGNLGLILLIRADTSLNTPMYFFLSNLAFVDFCYSSVITPKMLGNFLYKQNVISFDACATQLGCFLTFMISESLLLASMAYDRYVAICNPLLYMVVMTPGICIQLVAVPYSYSFLMALFHTILTFRLSYCHSNIVNHFYCDDMPLLRLTCSDTRFKQLWIFACAGIMFISSLLIVFVSYMFIISAILRMHSAEGRQKAFSTCGSHMLAVTIFYGTLIFMYLQPSSSHALDTDKMASVFYTVIIPMLNPLIYSLQNKEVKEALKKIIINKN

SEQ ID NO: 381 - protein, 309 aa, Artificial Sequence
  Synthetic
MAHINCTQATEFILVGLTDHQELKMPLFVLFLSIYLFTVVGNLGLILLIRADTSLNTPMYFFLSNLAFVDFCYSSVITPKMLGNFLYKQNVISFDACATQLGCFLTFMISESLLLASMAYDRYVAICNPLLYMVVMTPGICIQLVAVPYSYSFLMALFHTILTFRLSYCHSNIVNHFYCDDMPLLRLTCSDTRFKQLWIFACAGIMFISSLLIVFVSYMFIISAILRMHSAEGRQKAFSTCGSHMLAVTIFYGTLIFMYLQPSSSHALDTDKMASVFYTVIIPMLNPLIYSLQNKEVKEALKKIIINKN

SEQ ID NO: 382 - protein, 319 aa, Artificial Sequence
  Synthetic
MAQINCTQVTEFILVGLTDRKELKMPLFVVFLFIYLFTAIGNLGLILVIRTDARLNTPMYFFLSNLAFVDFCYSSVITPKMLGNFLYSKNAISFNACAAQLGCFLTFMVSECLLLASMAYDRYAAICNPLLYMVTMSPGICIQLVVVPYSYSFLMALIHTLLTFRLSYCHSNIINHFYCDDMPLLRLTCSDTHYKQLSILACAGITFISSVLIVSVSYMFIISAILRMRSAEGRRKAFSTCSSHMMAVSIFYGTLIFMYLQPSSDHSLDTDKMASVFYTVIIPMLNPLIYSLRNKDVKDALKRVMDNRNQTSIFRELRK

SEQ ID NO: 383 - protein, 319 aa, Artificial Sequence
  Synthetic
MAGSNATGVTEFILLGFAVQREVEIILFLLILVVYSLTLVGNVGMISLIRMDSRLHTPMYFFLSNLAFVDLCYSSSVAPKFLETLLSNRRSISFYACATQLGFFLNFLISEMFLLAVMAYDRYVAICNPLLYMVVMSQKVCLRLVMGPYFYSFAVALLHTVVTFKLIYCGPNIINHFYCDDVPLMALACSDTSLKEILIFIFAGFNMISSLTTVLISYLYIVAAILRIQSTEGRCKAFSTCASHLTAVTIFYGTLIFMYLQPKSSHSLDTDKMASVFYTIVIPMLNPMIYSLRNQEVKSALRKALEKCYLLPLMHLKKG

SEQ ID NO: 384 - protein, 309 aa, Artificial Sequence
  Synthetic
MGRGNRTTVTEFVLMGFTDRPELQLPLFVVFLILITLVGNLGMILLIKADSRLHTPMYYFLSHLAFIDLCYSSSIGPKMLQNLLVKKKTISFSGCFAQLYFSSAFVTTECFLLATMAYDRYMAICNPLTYTAIMTQRVCKELVIGVYTYGFLNSVIQTVLTFQLSFCNSNVIHHFYCADPPLLALSCSDTHNKERQLLIFSAVNLTGSLMTVLISYICILVSIIKIEPSQGKCKAFSTCASHLTVVTIFYGTLFFMYMRQPKTGSSWKYSKVISVFYSLVIPMLNPLIYSLRNTEVKDTLKKMLEGKTS

SEQ ID NO: 385 - protein, 315 aa, Artificial Sequence
  Synthetic
MAPENFTRVTEFILTGVSSCPELQIPLFLVFLVLYGLTMAGNLGIITLTSVDSRLQTPMYFFLQHLALINLGNSTVIAPKMLINFLVKKKTTSFYECATQLGGFLFFIVSEVIMLALMAYDRYVAICNPLLYMVVVSRRLCLLLVSLTYLYGFSTAIVVSSYVFSVSYCSSNIINHFYCDNVPLLALSCSDTYLPETVVFISAATNVVGSLIIVLVSYFNIVLSILKICSSEGRKKAFSTCASHMMAVTIFYGTLLFMYVQPRSNHSLDTDKMASVFYTLVIPMLNPLIYSLRNKDVKTALQRFMTNLCYSFKTM

SEQ ID NO: 386 - protein, 315 aa, Artificial Sequence
  Synthetic
MAPENFTRVTEFILTGVSSCPELQIPLFLVFLVLYVLTMAGNLGIITLTSVDSRLQNPMYFFLRHLAIINLGNSTVIAPKMLMNFLVKKKTTSFYECATQLGGFLFFIVSEVMMLAVMAYDRYVAICNPLLYMVVVSRRLCLLLVSLTYLYGFSTAIVVSPCIFSVSYCSSNIINHFYCDIAPLLALSCSDTYIPETIVFISAATNLVFSMITVLVSYFNIVLSILRIRSPEGRKKAFSTCASHMIAVTVFYGTMLFMYLQPQTNHSLDTDKMASVFYTLVIPMLNPLIYSLRNNDVNVALKKFMENPCYSFKSM

SEQ ID NO: 387 - protein, 315 aa, Artificial Sequence; identical to SEQ ID NO: 386
  Synthetic

SEQ ID NO: 388 - protein, 318 aa, Artificial Sequence
  Synthetic
MATGNLTHVTEFILMGVTDRPELQVPLFFLFLVIYLLTAAGNLGIITLTSVDSRLQTPMYFFLRHLAVINFGNSTVIAPKMLVNFLVSKKTTLYYECATQLGGFLVFMVSEIFMLAVMAYDRYVAICNPLLYMVVVSRRVCLLLVFLTYLFSFVTAIVVTPCVFSVSYCSSNVINHFYCDNVPLLALSCSDTHLPETVVFFFSATNLFFSMIIVLISYFNIVLAILRIRSSEGRKKAFSTCASHMMAVTVFYGTLLFMYLQPRTNHSLDTDKIASVFYTLIIPMLNPVIYSLRNKDVKCALKEFLKNPMQKIQSYMNL

SEQ ID NO: 389 - protein, 315 aa, Artificial Sequence
  Synthetic
MATGNLTHVTEFILMGVTDRPELQVPLFFLFLVIYLLTAAGNLGIITLTSVDSRLQTPMYFFLRHLAVINFGNSTVIAPKMLVNFLVSKKTTLYYECATQLGGFLVFMVSEIFMLAVMAYDRYVAICNPLLYMVVVSRRVCLLLVFLTYLFSFVTAIVVTPCVFSVSYCSSNVINHFYCDNVPLLALSCSDTHLPETVVFFFSATNLFFSMIIVLISYFNIVLAILRIRSSEGRKKAFSTCASHMMAVTVFYGTLLFMYLQPRTNHSLDTDKIASVFYTLIIPMLNPVIYSLRNKDVKCALKEFLKNPCKKFNLI

SEQ ID NO: 390 - protein, 315 aa, Artificial Sequence
  Synthetic
MATGNLTHVTEFILMGVSDRPELQVPLFFLFLVIYLLTAAGNLGIITLTSVDSRLQTPMYFFLRHLAIINFGNSTVIAPKMLVNFLVSKKTTLYYECATQLGGFLVFIVAEIFMLAVMAYDRYVAICNPLLYMVVVSRRVCLLLVFLTYLFSFVTAIVVTPCVFSVSYCSSNVINHFYCDNVPLLALSCSDTHLPETVVFFFSATNLFFSMIIVLISYFNIILAILRIRSSEGRKKAFSTCASHMMAVTVFYGTLLFMYLQPRTNHSLDTDKMASVFYTLIIPMLNPVIYSLRNKDVKCALKEFLKNPCKRFNLI

SEQ ID NO: 391 - protein, 315 aa, Artificial Sequence
  Synthetic
MAPRNLSHVTEFILVGVSDLPELQVPLFFVFLVIYLLTAAGNLGIITLTSVDSRLQTPMYFFLRHLAVINFGNSTVIAPKMLVNFLVSKKTTLYYECATQLGGFLVFIVAEIFMLAVMAYDRYVAICNPLLYMVVVSRRVCLLLVSLTYFYGFCTAIVVSSCVFSVSYCSSKKINHFYCDNVPLLALSCSDTYLPETVVFISAATNLFFSMSIVLVSYFNIVLSILRIRSAEGRKKAFSTCASHVMAVTVFYGTLLFMYLQPQTNHSLDTDKMASVFYTLVIPMLNPMIYSLRNKDVKAALKRFMTSPCDSFKSL

SEQ ID NO: 392 - protein, 318 aa, Artificial Sequence
  Synthetic
MNHVVKHNHTVTKVTEFILMGITDNPGLQAPLFGLFLIIYLVTVIGNLGMVILTYLDSKLHTPMYFFLRHLSITDLGYSTVIAPKMLVNFIVHKNTISYNWYATQLAFFEIFIISELFILSAMAYDRYVAICKPLLYVIIMAEKVLWVLVIVPYLYSTFVSLFLTIKLFKLSFCGSNIISYFYCDCIPLMSILCSDTNELELIILIFSGCNLLFSLSIVLISYMFILVAILRMNSRKGRYKAFSTCSSHLTVVIMFYGTLLFIYLQPKSSHTLAIDKMASVFYTLLIPMLNPLIYSLRNKEVKDALKRTLTNRFKIPI

SEQ ID NO: 393 - protein, 315 aa, Artificial Sequence
  Synthetic
MEKSNHSRIQVTEFILLGLTNNPGLKAPLFVIFLIIYLVTLMGNLGMVILTHVDSKLHTPMYFFLRHLSITDLGYSTVIGPKMMVNFVMQQNIISYTGCAVQLTFFEIFIITELFILSAMAYDRYVAICKPLLYVIIMAGKVRWGLVLVPYLYSLFVSLLLTVKLFTLSFCGSNTISYFYCDCVPLISLLCSDTHELELIILIFSGCNLLSSLLIVLVSYMFIFVAILRMNSKEGRSKAFSTCSSHLTVVVVFYGTLLFIYLQPKSSHTFEIDKMASVFYTLVIPMLNPLIYSLRNKEVKEALKRTLTQGLRIHT

SEQ ID NO: 394 - protein, 315 aa, Artificial Sequence
  Synthetic
MEKSNHSRIQVTEFILLGLTNNPGLKAPLFVIFLIIYLVTLMGNLGMVILTHVDSKLHTPMYFFLRHLSITDLGYSTVIGPKMMVNFVMQQNIISYTGCAVQLTFFEIFIITELFILSAMAYDRYVAICKPLLYVIIMAGKVRWGLVLVPYLYSLFVSLLLTVKLFTLSFCGSNIISYFYCDCVPLISLLCSDTHELELIILIFSGCNLLSSLLIVLVSYMFIFVAILRMNSKEGRSKAFSTCSSHLTVVVVFYGTLLFIYLQPKSSHTFEIDKMASVFYTLVIPMLNPLIYSLRNKEVKEALKRTLTQGLRIHT

SEQ ID NO: 395 - protein, 313 aa, Artificial Sequence
  Synthetic
MEKQNLTVLSEFILKGITDRPELQAPLFGLLFIIYLISAVGNLGIIIITNVDSRLHTPMYFFLKHLAFTDLGYSTAIGPKMLVNFVAEHNSVSYYLCATQLACFLLFITCELFILSSMSYDRYVAICNPLLYTVIMSQRICWVLVAVPYIYSVFVSLIVTIRLFTLSFCGYNIINHFFCDCIPLISLLCSNTHEVEVIIRFFATFDLISSLLVVLVSYLFILITILRMKSAAGRRKAFSTCGSHLTVVIVFYGTLIFMYVQPKSSQTFETDKVSSIFYTLVIPMLNPLIYTLRNKDVKDAIERTWEKIVTSFS

SEQ ID NO: 396 - protein, 313 aa, Artificial Sequence
  Synthetic
MEKQNLTVLSEFILKGITDRPELQAPLFGLLFIIYLISAVGNLGIIIITNVDSSLHTPMYFFLKHLAFTDLGYSTAIGPKMLVNFVAEHNSVSYYLCATQLACFLLFITCELFILSSMSYDRYVAICNPLLYTVIMSQRICWVLVAVPYIYSVFVSLIVTIRLFTLSFCGYNIINHFFCDCIPLISLLCSNTHEVEVIIRFFATFDLISSLLVVLLSYLFILITILRMKSAAGRCKAFSTCGSHLTVVIVFYGTLIFMYVQPKSSQTFETDKVSSIFYTLVIPMLNPLIYTLRNKDVKDAIERTWEKIVTSFS

SEQ ID NO: 397 - protein, 313 aa, Artificial Sequence
  Synthetic
MENHNLTMVTEFILVGITDRPELQAPLFGLFLIIYLITLVGNLGMIILTMVDSRLQTPMYFFLRHLATTDLGYSTAVGPKMLRNFLVEQNTISIYFCAVQLSFFSMFIVSEFFILSAMSYDWYVAICKPLLYNVIMSKRVCWLLVAIPYLYSIFVALIVTINIFSSSFCGHNIISHFYCDGLPLISLLCSNKKESEMIILILSTINLISSPVVILVSYLLILRAILKMNSAEGRQKAFSTCGSHLTVVTVFYGTLIFMYVQPKSNHTLNTDKVASIFYTLIIPMLNPLIYSLRNKDVKYALRKTGKSIQNIFS

SEQ ID NO: 398 - protein, 313 aa, Artificial Sequence
  Synthetic
MKKQNFTMVTEFILVGITDCPELQAPLFGLFLIIYLITLVGNLGMIILTMVDSRLQTPMYFFLRHLATTDLGYSTAVGPKMLRNFLVEQNTISFYICAVQLTFFNMFIVSEFFILSAMSYDRYVAICKPLLYNVIMSQRVCWVLVAIPYIYSIFVALLISINIFSSSFCGHNIISHFYCDGLPLISLLCSYRKENEMITFILSIINLITSPLVILASYLLILRAILRMNSAEGRQKAFSTCGSHLTVVTVFYGTLIFMYVQPKSSDSLKTDKVASIFYALIIPMLNPLIYSLRNKDVKSALRKTGKTIQNIFS

SEQ ID NO: 399 - protein, 312 aa, Artificial Sequence
  Synthetic
MQMESQNLTVVTEFILRGITDRPELQVPLFGLFFMIYLISLFGNLGMIILTIVESRLQTPMYFFLRHLAITDLGYSTAIGPKMLANFVVSKNTISFHLCATQLAFFLLFIACELFILSVMSYDRYVAICNPLLYNVIMSQTVCWVLVAIPYLYSVFISLIVTINIFSSSFCGYNVIPHFYCDGLPLISLLCTNTDKIGLIILILSAINLISSLLIILGSYLLIFRAILRMNSAEGRRKAFSTCGSHLTVVSVFYGTLIFMYVQPKTSHSFDTDKVASIFYTLVIPMLNPLIYSLRNKDVKYALRKIIQNNFS

SEQ ID NO: 400 - protein, 315 aa, Artificial Sequence
  Synthetic
MQMESQNLTVVTEFILRGITDRPELQVPLFGLFFMIYLISLFGNLGMIILTIVESRLQTPMYFFLRHLAITDLGYSTAIGPKMLANFVVSKNTISFHLCATQLAFFLLFIACELFILSVMSYDRYVAICNPLLYNVIMSQTVCWVLVAIPYLYSVFISLIVTINIFSSSFCGYNVIPHFYCDGLPLISLLCTNTDKIGLIILILSAINLISSLLIILGSYLLIFRAILRMNSAEGRRKAFSTCGSHLTVVSVFYGTLIFMYVQPKTSHSFDTDKVASIFYTLVIPMLNPLIYSLRNKDVKYALRKTGKIIQNNFS

SEQ ID NO: 401 - protein, 312 aa, Artificial Sequence
  Synthetic
MEKRNLTVVTEFILMGITDRPELQAPLFGLFLIIYLISLLGNMGMIILTMVDSRLQTPMYFFLRHLAITDLGYSTAVGPKMLENFVVNQNTISNHLCAIQLTFFLVFIICELFILSAMSYDRYVAICKPLLYTVIMSHRVCWVLVAVPYFYSVIISLLITIKIFALPFCDYRIVSHFCDSLPLISLLCSNTHDIEIIILISAGFNLVSSLVVLLFSYLLILIAIFRMNSAEGRQKALSTCGSHLTVVIVFYGTLIFMYVQPKSSHSFDTDKVASIFYTLIIPMLNPLIYSLRNKDVKYALERLWKMLGNIFS

SEQ ID NO: 402 - protein, 319 aa, Artificial Sequence
  Synthetic
MGRHNLTVVTEFVLMGITDRPELQAPLFGLFLIIYLISLIGNLGMIILTTVDSKLQTPMYFFLKHLAITDLGYSTSVGPKMLVNFVVDQNTISFKLCATQLSFFLVFIVSELFILSAMSYDRYVAICKPLLYTVIMSQKLCWVLVAIPYLYCTFVSLLVTVKIFTLSFCGYNVISHFYCDSLPLLPLLCSDTHDIELIILILAAFDLISSLLVVLVSYLLILIAIVRMNSAEGRRKAFSTCGSHLTVVIVFYGTLIFMYVQPNSSHSFETDKVASIFYTLVIPMLNPLIYSLRNKDVKYALKRTLNNLCKLFSLAFHKI

SEQ ID NO: 403 - protein, 312 aa, Artificial Sequence
  Synthetic
MEQHNLTTVNEFILTGITDIAELQAPLFALFLMIYVISVMGNLGMIVLTKLDSRLQTPMYFFLRHLAFMDLGYSTTVGPKMLVNFVVDKNIISYYFCATQLAFFLVFIGSELFILSAMSYDLYVAICNPLLYTVIMSRRVCQVLVAIPYLYCTFISLLVTIKIFTLSFCGYNVISHFYCDSLPLLPLLCSNTHEIELIILIFAAIDLISSLLIVLLSYLLILVAILRMNSAGRQKAFSTCGAHLTVVIVFYGTLLFMYVQPKSSHSFDTDKVASIFYTLVIPMLNPLIYSLRNKDVKYALRRTWNNLCNIFV

SEQ ID NO: 404 - protein, 312 aa, Artificial Sequence
  Synthetic
MEQHNLTTVNEFILTGITDIAELQAPLFALFLMIYVISVMGNLGMIVLTKLDSRLQTPMYFFLRHLAFMDLGYSTTVGPKMLVNFVVDKNIISYYFCATQLAFFLVFIGSELFILSAMSYDRYVAICNPLLYTVIMSRRVCQVLVAIPYLYCTFISLLVTIKIFTLSFCGYNVISHFYCDSLPLLPLLCSNTHEIELIILIFAAIDLISSLLIVLLSYLLILVAILRMNSAGRQKAFSTCGAHLTVVIVFYGTLLFMYVQPKSSHSFDTDKVASIFYTLVIPMLNPLIYSLRNKDVKYALRRTWNNLCNIFV

SEQ ID NO: 405 - protein, 316 aa, Artificial Sequence
  Synthetic
MENHNLTMVTEFILMGITACPELQPPLFVLFLIIYLISLIGNLGMIILTLVDSRLQTPMYFFLRHLSTTDLGYTTAVGPKMLQNFLVDQNTISFHLCAIQLSFFSMFIACEIYILSAMSYDRYVAICKPLFYMVIMSKRLCLVLVVIPYVYCTIVALLITIKIFTLSFCGSNVISHFYCDSLPLLSLVCSNTQEIEVILLYLSAFNLISSLLLVLVSYLLILIAIIRMHSAEGRRKAFSTCGSHLTMVTVFYGTLIFMYMQPKSSHSFDTDKVASIFYTMVIPMLNPLIYSLRNKDVKDALHRTLKKIHGFLLKLT

SEQ ID NO: 406 - protein, 313 aa, Artificial Sequence
  Synthetic
MENQNRTVVTEFILMGITDHPELQSSLFGLFLLIYLISLVGNLGMIVLTMVDSRLQTPMYFFLRHLATTDLGYSTTVGPKMLTNFIVDQNRISFNLCATQLAFFLLFIACELFILSAMSYDRYVAICKPLFYMVIMSKRLCWVLVVIPYVYCTIVALLITIKIFTLSFCGSNVISHFYCDSLPLLSLVCSNTQEIEVIMLFLSAFNLISSLLLVLVSYLLILIAILRMNSAEGRRKAFSTCGSHLTVDTVFYGTLIFMYMQPKSSHSFDTDKLASVFYTLIIPMLNPLIYSLRNKDVKDALHRTGKKLHSVCF

SEQ ID NO: 407 - protein, 313 aa, Artificial Sequence
  Synthetic
MENQNRTVVTEFILMGITDHPELQSSLFGLFLLIYLISLVGNLGMIVLTMVDSRLQTPMYFFLRHLATTDLGYSTTVGPKMLTNFIVDQNRISFNLCATQLAFFLLFIACELFILSAMSYDRYVAICKPLFYMVIMSKRLCWVLVVIPYVYCTIVALLITIKIFTLSFCGSNVISHFYCDSLPLLSLVCSNTQEIEVIMLFLSAFNLISSLLLVLVSYLLILIAILRMNSAEGRRKAFSTCGSHLTVVTVFYGTLIFMYMQPKSSHSFDTDKLASVFYTLIIPMLNPLIYSLRNKDVKDALHRTGKKLHSVCF

SEQ ID NO: 408 - protein, 299 aa, Artificial Sequence
  Synthetic
MGITDHPDLQPSLFGLFLLIYLISLVGNLGMIILTMVDSRLQTPMYFFLRQLATTDLGYSTAVGPKMLTNFIVDQNRIFFNLCTTQLAFFLLFIACELFILSAMSYDRYVAICKPLFYMVIMSKRLCWVLVVIPYVYCTIVALLITIKIFTLSFCGSNVISHFYCDSLPLLSLVCSNTQEIEVIMLFLSAFNLISSLLLVLVSYLLILIAILRMNSAEGRRKAFSTCGSHLTVDTVFYGTLIFMYMQPKSSHSFDTDKLASAFYTLIIPMLNPLIYSLRNKDVKDALHRIGKKLHSVSF

SEQ ID NO: 409 - protein, 313 aa, Artificial Sequence
  Synthetic
MDKHNLTVVTEFILMGITENPELQAPLFGLFLVIYLTSVIGNLGIIILTNVDAKLQTPMYFFLRHLAFTDFVYSTTVGPKMLVNFVVDQNAISYSLCATQLAFFLLFIGSDLFILSAMSYDRYVAICKPLLYTVIMSHKVCWVLVTMTYLYCTFMSLVVTINIFSLSFCGYNVINHFFCDCIPLISLLCSNTQEVELIVMIFAAFDLISSLVVVLMSYLLILIAVLRMNSAEGRRKAFSTCGSHLTVVTVFYGTLIFMYVQPESSHSIDTDKISSIFYTLIIPLLNPLIYSLRNKDVKEALQRTWQKIFNTFS

SEQ ID NO: 410 - protein, 313 aa, Artificial Sequence
  Synthetic
MDKHNLTVVTEFILMGITENPELQAPLFGLFLVIYLTSVIGNLGIIILTNVDAKLQTPMYFFLRHLAFTDFVYSTTVGPKMLVNFVVDQNAISYSLCATQLAFFLLFIGSELFILSAMSYDRYVAICKPLLYTVIMSHKVCWVLVTMTYLYCTFMSLVVTINIFSLSFCGYNVINHFFCDCIPLISLLCSNTQEVELIVMIFAAFDLISSLVVVLMSYLLILIAVLRMNSAEGRRKAFSTCGSHLTVVTVFYGTLIFMYVQPESSHSIDTDKISSIFYTLIIPLLNPLIYSLRNKDVKEALQRTWQKIFNTFS

SEQ ID NO: 411 - protein, 313 aa, Artificial Sequence
  Synthetic
MDKHNLTVVTEFILMGITENPELQAPLFGLFLVIYLTSVIGNLGIIILTNVDAKLQTPMYFFLRHLAFTDFVYSTTVGPKMLVNFVVDQNAISYSLCATQLAFFLLFIGSELFILSAMSYDRYVAICKPLLYTVIMSHKVCWVLVTMTYLYYTFMSLVVTINIFSLSFCGYNVINHFFCDCIPLISLLCSNTQKVELIVMIFAGFDLISSLVVVLMSYLLILIAVLRMNSAEGRRKAFSTCGSHLTVVTIFYGTLIFMYVKPVSSHSIDTDKISSILYTLIIPLLNPLIYSLRNKDVKDALQRTWQKIFNTFP

SEQ ID NO: 412 - protein, 313 aa, Artificial Sequence
  Synthetic
MDKHNLTVVTEFILMGITENPELQAPLFGLFLVIYLTSVVGNLGIIILTNVDAKLQTPMYFFLRHLAFTDFVYSTTVGPKMLVNFVVDQNAISYSLCATPLAFFLLFIGSDHFILSAMSYDRYVAICKPLLYTVIVSHKVCWLLVTMTYLYCTFMSLVVTINIFSLSFCGYNVINHFFCDCIPLISLLCSNTQEVELIVMFFAAFDLISSLVVVLMSYLLILIAVLRMNSAEGRRKAFSTCGSHLTVVTIFYGTLIFMYVKPVSSHSIDTEKISSILYTLIIPLLNPLIYSLRNKDVKEALQRTWQKIFNTFS

SEQ ID NO: 413 - protein, 313 aa, Artificial Sequence
  Synthetic
MKEHNLTVMTEFILMGISDHSELQAPLFGLFLAIYMTSMVGNLGIIVLTTVDSRLQTPMYFFLRHLAITDLGYSTAVGPKMLENFVVDQNTISFNLCATQLAFFLVFIGSELFILSAMSYDRYVAICKPLLYTVLMSQKLCWVLMSMPYLYCTFVSLLITVKIFTSSFCGYNVINHFYCDCIPLLSLLCSHAEEIAFIVMIFAAFDLIVSLLIVLVSYMFILIAVLRMNSAEGRYKAFSTCGSHLTVVTVFYGTLIFMYVQPQSSHSDDNDKVSSIFYTLVIPMLNPLIYSLRNKDVKFALHRTWRNICKIFP

SEQ ID NO: 414 - protein, 313 aa, Artificial Sequence
  Synthetic
MEKYNLTIVTEFILVGITNHHEFQVPLFGLYLIIYLTSLVDNLGMIILTIVDSRLQTPMYFFLRHLATTDLGYSTAVGPKMLRNFLVDQNIISFYACAIQSSFFGMFIVCEFFILSAMSYDRYVAICKPLLYTVIMSQKACWILVTIPYLYSIIVSLLVNIKIFTLSFCGYNVISHFYCDALPLLTLACSNTHEIEAIILIFSAFNLLSSLLIVIGSYLLILMAILRINSTEGKWKAFSTCGSHLTVVIVFYGTLICMYLQPTSTHSIDTGKGTSIFYTQVIPMLNPLIYSLRNKDVTDVLKKTKEKVYNLVS

SEQ ID NO: 415 - protein, 313 aa, Artificial Sequence
  Synthetic
MEKYNLTIVTEFILVGITNHHEFQVPLFGLYLIIYLTSLVDNLGMIILTIVDSRLQTPMYFFLRHLATTDLGYSTAVGPKMLRNFLVDQNIISFYACAIQSSFFGMFIVCEFFILSAMSYDRYVAICKPLLYTVIMSQKACWILVTIPYLYSIIVSLLVNIKIFTLSFCGYNVISHFYCDALPLLTLACSNTHEIEAIILIFSAFNLLSSLLIVIGSYLLILMAILRINSAEGKWKAFSTCGSHLTVVIVFYGTLIFMYLQPTFTHSIDTGKVISIFYTQVIPMLNPLTYSLRNKDVKDVLKKPMEKVHNLFS

SEQ ID NO: 416 - protein, 313 aa, Artificial Sequence
  Synthetic
MEKYNLTMVTEFILVGITYHPEFQVPLFGLFLIIYLTSLFGNLGMIILTMVDSGLQTPMYFFLRHLATTDLGYSTAVGPKMLRNFLVDQNTISFNACDIQSSFFSMFIVCEFFILSALSYDCYVAICKPLLYTVIMSQKVCWILVTIPYLYSIIVSLIINIKIFTLSFCGYNVISHFYCDALPLLTLACSNTHEIEAIILIFSAFNLLSSLLIVIGSYLLILMAILRINSTEGKWKAFSTCGSHLTVVIVFYGTLICMYLQPTSTHSIDTGKGTSIFYTQVIPMLNPLIYSLRNKDVTDVLKKTKEKVYNLVS

SEQ ID NO: 417 - protein, 311 aa, Artificial Sequence
  Synthetic
MERQNFTVVKDFILIGITNRPELKGPLFGLFLIIYLISLMGNMGMIILTIVDPRLQTPMYFFLKHLAVTDLGYSTAVGPKMLENFVVNQNTISYYLCALQLACFLLFITCELFILSAMSYDRYVAICNPLLYNVIMSKKKCWLLIVIAYLYGLFLSLIITLKMFRLSFCSYNIINHFFCDCIPLIPLLCSNTHEIQLIILVFAIFDSICSLLVVLVSYLLILITILRMNSTEGRHKAFANCGSHITVVTVFYGTLISMYLQPNYSHSFDTDKLASIFYTMIIPMLNPLIYSLRNKDVKNAGQRIWKKLCKI

SEQ ID NO: 418 - protein, 311 aa, Artificial Sequence
  Synthetic
MERQNFTVVKDFILIGITNRPELKGPLFGLFLIIYLISLMGNMGMIILTIVDPRLQTPMYFFLKHLAVTDLGYSTAVGPKMLENFVVNQNTISYYLCALQLACFLLFITCELFILSAMSYDHYVAICNPLLYNVIMSKKKCWLLIVIAYLYGLFLSLIITLKMFRLSFCSYNIINHFFCDCIPLIPLLCSNTHEIQLIILVFAIFDLICSLLVVLVSYLLILITILRMNSTEGRHKAFATCGSHITVVTVFYGTLISMYLQPNYSHSFDTDKLASIFYTMIIPMLNPLIYSLRNKDVKNAGQRIWKKLCKI

SEQ ID NO: 419 - protein, 315 aa, Artificial Sequence
  Synthetic
MDTYNLTVLKYFILTGITDLPELQAPLFGLFLIIYMISVVGNLGLIILTKIDSRLQTPMYFFLRQLSLTDLGYSTAVGPKMLINFVADQPTISYNWCSVQLTFFSIFITTEVFILSAMAYDRYVAICHPLLYTIIMSQRLCHVLVAIPYLYSVFISLWTIIKIFTSSFCGHNIIRYFYCDSLPLILMLCSDTHEIKLIILIFATFNLISSLLVVSISYILILVSILRMNSSEGRHKAFSTCGSHLTVIVIFYGTLFFMYAQPKSIHSFETGQVASLFYTLVIPMLNPMIYSLRNQEVKQALNRKWKMCVNILFKL

SEQ ID NO: 420 - protein, 319 aa, Artificial Sequence
  Synthetic
MDTYNLTVLKYFILTGITDLPELQAPLFGLFLIIYMISVVGNLGLIILTKIDSRLQTPMYFFLRQLSLTDLGYSTAVGPKMLINFVADQPTISYIWCSVQLTFFSIFITTEVFILSAMAYDRYVAICHPLLYTIIMSQRLCHVLVAIPYLYSVFISLWTIIKIFTSSFCGHNIIRHFYCDSLPLILMLCSDTHEIKLIILIFATFNLISSLLVVSISYILILVSILRMNSSEGRHKAFSTCGSHLTVIVIFYGTLFFMYAQPKSIHSFETGQVASLFYTLVIPMLNPMIYSLRNQEVKQALNRKWKMCVNILFCWEPRP

SEQ ID NO: 421 - protein, 313 aa, Artificial Sequence
  Synthetic
MENQNLSVLNEFILVGITDRPELQAPFFVLFFLIYVASVVGNLGMIVLTKLDERLQTPMYFFLRHLAFIDFGYSTAVGPKTLVSFVTNKNTIPYNWCAFQLSLFIFFIISELFVLSAMAYDRYVAICNPLLYTVIMSQKVCWVLVTIPYLFSAFLSLITTIKIFISSFCGYNVISHFYCDSLPLLTLICSGTRDIELIILIFSAFNLISSLSVVLVSYTFILVAILRMNSAEGRHKAFSTCGSHLTVVVILYGTLSFMYIQPKSSHSFENDKMASVFYTLVIPVLNPIIYSLRNKEVKGALQKLWKNVCKVCI

SEQ ID NO: 422 - protein, 313 aa, Artificial Sequence
  Synthetic
MGQQNTTSLPGFILMGITQSTELQLPLFGVFFIIYAVTVMGNLGMIILTKLDSRLQTPMYFFIRHLAFIDLGNSTVICPKMLMDFVMDEKNISFYACATQMSFFVLFIISELFILSSMAYDCYVAICNPLLYSVIMSQRLCHVLVDIPYLYSTFQALLFTSKIFTLTFCGSNIISHFYCDAVYLLPTLCSNAEEIQLLIILFSALNLLSSLLIVLGLYVLILIAICRMHSAEGRRKAFSTCGSHLTVVVVFYGTLLFMYLQPKSTDSLENDKITSVFYTLVIPMINPLIYSLRNKEVKNAFNRALKNPFKINT

SEQ ID NO: 423 - protein, 313 aa, Artificial Sequence
  Synthetic
MGQQNTTSLPGFILMGITQRTELQLPLFGAFFIIYAVTVMGNLGMIILTKLDSHLETPMYFFIRHLAFIDLGNSTVICPKMLVDFVMNDKTISFCECATQLSFFLMFIITEFFILSAMAYDRYVAICNPLLYSVIMSQRLCHVLVGIPYLYSTVQALLVTSRIFTSTFCGSNIISHFYCDGIFLLPILCSNAEEIQLVIISFSALNLISSFLVVLGSYVLILIAICRMHSAEGRRKAFSTCGSHLTVVVVFYGTLFFMYLQPKSTDSLENDKIASVFYTLVIPMLNPLIYSLRNKEVKNAFYRVLKGQFKINT

SEQ ID NO: 424 - protein, 307 aa, Artificial Sequence
  Synthetic
MGQHNLTVLTEFILMELTRRPELQIPLFGVFLVIYLITVVGNLTMIILTKLDSHLHTPMYFSIRHLAFVDLGNSTVICPKVLANFVVDRNTISYYACAAQLAFFLMFIISEFFILSAMAYDRYVAICNPLLYYVIMSQRLCHVLVGIQYLYSTFQALMFTIKIFTLTFCGSNVISHFYCDDVPLLPMLCSNAQEIELLSILFSVFNLISSFLIVLVSYMLILLAICQMHSAEGRKKAFSTCGSHLTVVVVFYGSLLFMYMQPNSTHFFDTDKMASVFYTLVIPMLNPLIYSLRNEEVKNAFYKLFEN

SEQ ID NO: 425 - protein, 307 aa, Artificial Sequence [sequence omitted]

SEQ ID NO: 426 - protein, 308 aa, Artificial Sequence
  Synthetic
MGQPNITMPTEFILMGVTQTAELKLPLFAVFLTIYAITVVGNLGMIILTKLDSRLQTPMYFFIRHLAFIDLGNSTAICPKMLVNFVVDKNNITYYACATQMACFILFIVSEFSILSSMAYDRYVAICNPLLYSAIMSQRRCQVLIGIPYLYSIFQALLFPIRYFTLSFCGANVISHFYCDVVPLLPLICSHVEETELLTILFSAFNLISSLLVVLLSYMLILLTIFRMRSAEGRKKAFSTCGSHLTVVVVFYGSLLFMYVQPKSAHSFEYDKAASVFYTLVIPMLNPLIYSLRNKEVKNAFHRVFKNL

SEQ ID NO: 427 - protein, 308 aa, Artificial Sequence
  Synthetic
MGQPNITMPTEFILMGVTQTAELKLPLFAVFLTIYAITVVGNLGMIILTKLDSRLQTPMYFFIRHLAFIDLGNSTAICPKMLVNFVVDKNNITYYACATQMACFILFIVSELSILSSMAYDRYVAICNPLLYSAIMSQRRCQVLIGIPYLYSIFQALLFPIRYFTLSFCGANIISHFYCDVVPLLPLICSHVEETELLTILFSAFNLISSLVVVLLSYMLILLTIFQMRSAEGRKKAFSTCGSHLTVVVVFYGSLLFMYVQPKSAHSFEYDKAASVFYTLVIPMLNPLIYSLRNKEVKNAFHRVFKNL

SEQ ID NO: 428 - protein, 308 aa, Artificial Sequence
  Synthetic
MGQPNITMPTEFILMGVTQSAELKLPLFAVFLAIYAITVVGNLGMIILTKLDSRLQTPMYFFIRHLAFIDLGNSTAICPKMLVNFVVDKNTITYYACATQMACFILFIVSELSILSSMAYDRYVAICNPLLYSAIMSQRRCQVLIGIPYLYSIFQALLFPIRYFTLSFCGANVISHFYCDVVPLLPLICSHVEETELLTILFSAFNLISSLVVVLLSYMLILLTIFRMRSAEGRKKAFSTCGSHLTVVVVFYGSLLFMYVQPKSAHSFEYDKAASVFYTLVIPMLNPLIYSLRNKEVKNAFHRVFKNL

SEQ ID NO: 429 - protein, 317 aa, Artificial Sequence
  Synthetic
QKVEMSHRNSTVPDEFILTRITHRPELQLLLLGVFIVIYGVAMIGNMSMIILTKLDSRLHTPMYYFIRHLAFIDLGNCTVIYPKMMVNFVVEQNVISYYACAVQMAFYIAFIISELFILSAMAYDRYVAICNPLLYSAIMSQRRCHVLVGIPYLYSVFQAVMITSKIFTLTFCDSNVISHFYCDNVPMLLLLCSNARDIELLIILFSALNLISSLFVVLVSYLLILLAIYRMHSADGRKKAFSTCGSHLTVVVVFYGTLLFMYLQPKSTHSFETDKIASVFYTLVIPMLNPLIYSFRNKEVKNAVLRVFRYQCKLCT

SEQ ID NO: 430 - protein, 310 aa, Artificial Sequence
  Synthetic
MLNFTDVTEFILLGLTSRKELQVLFFVIFLMVYIVTMVGNIGMMILIKISPQLSSPMYFFLSHLSFVDVWFSSNVTPKMLENLLSKTKTISYAGCLVQCFFFIALVHVEIFILAVMAFDRYMAIGKPLLYGSKMSRVVCIRLISFPYIYGFLTSLAATLWTYGLYFCGKTEINHFYCADPPLIKMACAGTFVKEYTMIILAGINFTYSLSVVIISYLFILIAILRMRSAEGRRKAFSTCGSHLTAVVIFYGTLIFMYLRRPTEESVEKGKMVAVFYTTVIPMLNPMIYSLRNKDVKEAMDKVISRKGLTK

SEQ ID NO: 431 - protein, 308 aa, Artificial Sequence
  Synthetic
NFTDVTEFILLGLTSRKELQVLFFVIFLMVYIVTMVGNIGMMILIKISPQLSSPMYFFLSHLSFVDVWFSSNVTPKMLENLLSKTKTISYAGCLVQCFFFIALVHVEIFILAVMAFDRYMAIGKPLLYGSKMSRVVCIRLISFPYIYGFLTSLAATLWTYGLYFCGKTEINHFYCADPPLIKMACAGTFVKEYTMIILAGINFTYSLSVVIISYLFILIAILRMRSAEGRRKAFSTCGSHLTAVVIFYGTLIFMYLRRPTEESVEQGKMVAVFYTTVIPMLNPMIYSLRNKDVKEAMDKVISRKGLTK

SEQ ID NO: 432 - protein, 310 aa, Artificial Sequence
  Synthetic
MLNFTDVTEFVLLGLTRRKELQVLFFVIFLMVYIVTMVGNIGMMILIKISPQLSSPMYFFLSHLSFIDVWFSSNVTPKMLENLLSKTKTISYAGCLVQCFFFIALVHVEIFILSVMAFDRYMAIGKPLLYGSKMSRVVCIRLISFPYIYGFLTSLAATLWTYGLYFCGKTEINHFYCADPPLIKMACAGTFVKEYTMLFLAGINFTYSLIVVIISYLFILIAILRMRSAEGRRKAFSTCGSHLTAVGIFYGTLIFMYLRRPTEESVEQGKMVAVFYTTVIPMLNPMIYSLRNKDVKEAMDKVIAKKFLTK

SEQ ID NO: 433 - protein, 307 aa, Artificial Sequence
  Synthetic
MLNFTDVTEFILLGLTSRREWQVLFFIIFLVVYIITMVGNIGMMVLIKVSPQLNNPMYFFLSHLSFVDVWFSSNVTPKMLENLLSDKKTITYAGCLVQCFFFIALVHVEIFILAAMAFDRYMAIGNPLLYGSKMSRVVCIRLITFPYIYGFLTSLAATLWTYGLYFCGKIEINHFYCADPPLIKMACAGTFVKEYTMIILAGINFTYSLTVIIISYLFILIAILRMRSAEGRQKAFSTCGSHLTAVIIFYGTLIFMYLRRPTEESVEQGKMVAVFYTTVIPMLNPMIYSLRNKDVKKAMMKVISRSC

SEQ ID NO: 434 - protein, 310 aa, Artificial Sequence
  Synthetic
MPNFTDVTEFTLLGLTCRQELQVLFFVVFLAVYMITLLGNIGMIILISISPQLQSPMYFFLSHLSFADVCFSSNVTPKMLENLLSETKTISYVGCLVQCYFFIAVVHVEVYILAVMAFDRYMAGCNPLLYGSKMSRTVCVRLISVPYVYGFSVSLICTLWTYGLYFCGNFEINHFYCADPPLIQIACGRVHIKEITMIVIAGINFTYSLSVVLISYTLIVVAVLRMRSADGRRKAFSTCGSHLTAVSMFYGTPIFMYLRRPTEESVEQGKMVAVFYTTVIPMLNPMIYSLRNKDVKEAVNKAITKTYVRQ

SEQ ID NO: 435 - protein, 310 aa, Artificial Sequence; identical to SEQ ID NO: 434
  Synthetic

SEQ ID NO: 436 - protein, 308 aa, Artificial Sequence
  Synthetic
NFTDVTEFLLVGLTRRQELRVLFFVVFLVVYMVTLLGNIGMIILISISPQLQSPMYFFLSHLSFVDVLFSSNVTPKMLENLISETKTISYVGCLVQCYFFIALVHVEVYILAVMAFDRYMAICNPLLYSSKMSRVVCIRLISVPYVYGFSVSLICTLWTYGLYFCGNIKINHFYCADPPLIKIACGGVHIKEYTMIVIAGINFTYSLSVVLISYVLIVVAVLRMHSADGRRKAFSTCGSHLTAVSMFYGTLIFMYLRRPTEESVEQGKMVAVFYTSVIPMLNPMIYSLRNKDVKEAVYKIVAKANLRK

SEQ ID NO: 437 - protein, 308 aa, Artificial Sequence
  Synthetic
NFTDVTEFLLVGLTRRQELRVLFFVVFLVVYMVTLLGNIGMIILISISLQLQSPMYFFLSHLSFVDVLFSSNVTPKMLENLLSESKTISYVGCLVQCYFFIALVLVEVFILAVMAFDRYVAICNPLLYSSKMSRVVCIRLISVPYVYGFSVSLICTLWTYGLYFCGNVKINHFYCADPPLIKIACGGVHIKEYTMIVIAGINFTYSLSVVLISYVLIVVAVLRMHSADGRRKAFSTCGSHLTAVSMFYGTLIFMYLRRPTEESVEQGKMVAVFYTSVIPMLNPMIYSLRNKDVKEAVCKIVAKANLRK

SEQ ID NO: 438 - protein, 311 aa, Artificial Sequence
  Synthetic
MRRNCTLVTEFILLGLTSRRELQILLFTLFLAIYMVTVAGNLGMIVLIQANAWLHMPMYFFLSHLSFVDLCFSSNVTPKMLEIFLSEKKSISYPACLVQCYLFIALVHVEIYILAVMAFDRYMAICNPLLYGSRMSKSVCSFLITVPYVYGALTGLMETMWTYNLAFCGPNEINHFYCADPPLIKLACSDTYNKELSMFIVAGWNLSFSLFIICISYLYIFPAILKIRSTEGRQKAFSTCGSHLTAVTIFYATLFFMYLRPPSKESVEQGKMVAVFYTTVIPMLNLIIYSLRNKNVKEALIKELSMKIYFS

SEQ ID NO: 439 - protein, 318 aa, Artificial Sequence
  Synthetic
MTRNFTSVTEFILLGLTSHVELQILFFVLFLVVYVVTVAGNLGMILLIKANARLHTPMYFFLSHLSFVDMCFSSNVTPKMLQIFLSERKTISYSACLVQCYLFIALVHVEFYILALMAFDRYMAICNPLLYGSKMSQSVCTSLITVPYVYGALTGLMETMWTYNLAFCGHNEINHFYCADPPLIKLACSDTYHKETSMLVVAGFNLSFSLLIILTSYLYIFPAILRISSTEGKRKAFSTCGSHLTAVIIFYATLFFMYLRPTSRESVEQGKMVAVFYTTVIPMLNPMIYSLRNKDVKEAISKELSHKKMYFSEKRNSI

SEQ ID NO: 440 - protein, 318 aa, Artificial Sequence; identical to SEQ ID NO: 439
  Synthetic

SEQ ID NO: 441 - protein, 323 aa, Artificial Sequence
  Synthetic
KAYSEAKHNGTEATEFILLGLSTRSELQPILFLVFLTIYLITLTGNFGMILLIRFTPQLQTPMYFFLTHLACVDIFYSTNVSPQMLVNFLSEKKTISYIGCLTQCFVFVTLLLTEYYMLGAMAYDRYMAICKPLHYSTKLSRPVCICLVTFPYFWGSMVGTMQVILTSRLSFCGPNTINHFYCADPPLLMLTCSDTYIKQTALFVSAGINLTGSLLIILISYIFIFITIMRIRSSEGQRKALSTCGSHLTAVTMFYGSLFCMYLRPANERSVEQGKIIAVFCIFVSPMVNPFIYSLRNKDVKQALRRVFIRNLCKVEKSSVPM

SEQ ID NO: 442 - protein, 323 aa, Artificial Sequence
  Synthetic
KAYSEAKRNGTEATEFILLGLSTRPELQPILFLVFLTIYLITLTGNFGMILLIRFTPQLQTPMYFFLTHLACVDIFYSTNVSPQMLVNFLSEKKTISYIGCLTQCFVFVTLLLTEYYMLGAMAYDRYMAICKPLHYSTKLSRPVCICLVTFPYFWGSMVGTMQVILTSRLSFCGPNTINHFYCADPPLLMLTCSDTYIKQTALFVSAGINLTGSLLIILISYIFIFITIMRIRSSEGQRKALSTCGSHLTAVTMFYGSLFCMYLRPANERSVEQGKIIAVFCIFVSPMVNPFIYSLRNKDVKQALRRVFIRNLCKVEKSSVPM

SEQ ID NO: 443 - protein, 307 aa, Artificial Sequence
  Synthetic
MLKKNFTTVTEFIFLGLTDRAELQPVLFVVFLLIYLITVTGNVSMIFLIRSDSKLHTPMYFFLSHLSFVDLCYATTVAPQMLVNFLSKRKNISFIGCIIQFHFFIALVITDYYMLAVMAYDRYVAICKPLLYTSKMSRRVCLSLVATQYIYGFVNGLIQTILMLRLTFCGPNEINHFYCADPPLMVLACSDTYVKKTAMFVVAGSNLTCSLTIILISYIFIFTAILRIRSAEGRQKAFSTCGSHLTAVTIFYGTLFCMHLRPPSETSVEQGKIVAVFYIFVSPMLNPFIYSLRNKDVKNAIRKVIQK

SEQ ID NO: 444 - protein, 312 aa, Artificial Sequence
  Synthetic
MLRKNYTAVTEFVLLGLTDQAELQPVLFVVFLLIYLITVIGNVSMIFLIRSDSKLHTPMYFFLSHLSFVDLCYATNVTPQMLVNFLSKRKTISFIGCFIQFHFFIALVITDYYMLTVMAYDRYMAICKPLLYTSKMSRSVCLSLVAAPYIYGFANGLAQTILMLRLTFCGPNEINHFYCADPPLMVLACSDTYVKETAMFVVAGSNLTCSLTIILISYIFIFTAILRIRSAEGRRKAFSTCGSHLIAVTVFYGTLFCMYLRPPSEKSVEQGKIVAVFYIFVSPMLNPLIYSLRNKDVKNAIRKVVKKEVFLK

SEQ ID NO: 445 - protein, 316 aa, Artificial Sequence
  Synthetic
APKKMVRGNYSMVTEFILLGLTDRPELQPLLFVLFLVIYLITVGGNLGMMVLIRIDSRLHTPMYYFLASLSCLDLCYSTNVTPKMLVNFLSEKKTISYAACLVQCYFFIAMVITEYYMLAVMAYDRYMAICNPLLYSSKMSKGVCVRLIAGPYIYGFLSGLMETMWTYRLTFCGSNIINHFYCADPPLIRLSCSDTFIKETSMFVVAGFNLSNSLFIILISYLFILIAILRMRSAEGRRKAFSTCGSHLVAVTVFYGTLFCMYVRPPTDKSVEQSKIIAVFYTFVSPMLNPIIYSLRNKDVKHAFWKLVRRNVLSK

SEQ ID NO: 446 - protein, 305 aa, Artificial Sequence
  Synthetic
MSNTNGSAITEFILLGLTDCPELQSLLFVLFLVVYLVTLLGNLGMIMLMRLDSRLHTPMYFFLTNLAFVDLCYTSNATPQMSTNIVSEKTISFAGCFTQCYIFIALLLTEFYMLAAMAYDRYVAIYDPLRYSVKTSRRVCICLATFPYVYGFSDGLFQAILTFRLTFCRSSVINHFYCADPPLIKLSCSDTYVKEHAMFISAGFNLSSSLTIVLVSYAFILAAILRIKSAEGRHKAFSTCGSHMMAVTLFYGTLFCMYIRPPTDKTVEESKIIAVFYTFVSPVLNPLIYSLRNKDVKQALKNVLR

SEQ ID NO: 447 - protein, 305 aa, Artificial Sequence; identical to SEQ ID NO: 446
  Synthetic

SEQ ID NO: 448 - protein, 319 aa, Artificial Sequence
  Synthetic
MPHTNSTKITEFILLGLTDRPELQPLLFVLFLFIYLVTVLGNMGLMALIRLDSRLHKPMYFFLSNLAFVDLCYTSTATPQMLTNFLSEKKTISFIGCFIQCYLFIALLLTEFYMLAAMAYDRYVAICNPLRYSVKMSRRVCICLAMCPYIYGFSDGLFQAILTFSMTFCKSNVINHFYCADPPLIKLSCSDTYKKEHAMLISAGFNLSNSLTIILVSYAFIIAAILRIKSAEGRRKAFSTCGSHMMAVTLFYGTLFCMYVRPPTDKTVEESKIIAVFYTFVSPLLNPLIYSLRNKDVKQALKTILRQNVIRTALMRPPS

SEQ ID NO: 449 - protein, 319 aa, Artificial Sequence
  Synthetic
MPLTNSTKITEFILLGLTDRPELQPLLFVLFLFVYIVTVLGNMGMVALIRLDSRLHKPMYFFLSNLAFVDLCYTSTATPQMLTNFLSEKKTISFIGCFIQCYLFIALLLTEFYMLAAMAYDRYVAICNPLRYSVKMSRRVCICLAMCPYIYGFSDGLFQAILTFSMTFCKSNVINHFYCADPPLIKLSCSDTYKKEHAMLISASFNLSSSLTIILVSYAFIIAAILRIKSAEGRHKAFSTCGSHMMAVTLFYGTLFCMYVRPPTDKTVEESKIIAVFYTFVSPLLNPLIYSLRNKDVKQALKTILRQNVIRTALMRPPS

SEQ ID NO: 450 - protein, 315 aa, Artificial Sequence
  Synthetic
MLSPNHTIVTEFILLGLTDDPVLEKILFGVFLAIYLITLAGNLCMILLIRTNSQLQTPMYFFLGHLSFVDICYSSNVTPNMLHNFLSEQKTISYAGCFTQCLLFIALVITEFYFLASMALDRYVAICSPLHYSSRMSKNICISLVTVPYMYGFLNGLSQTLLTFHLSFCGSLEINHFYCADPPLIMLACSDTRVKKMAMFVVAGFTLSSSLFIILLSYLFIFAAIFRIRSAEGRHKAFSTCASHLTIVTLFYGTLFCMYVRPPSEKSVEESKIIAVFYTFLSPMLNPLIYSLRNRDVILAIQQMIRGKSFCKIAV

SEQ ID NO: 451 - protein, 315 aa, Artificial Sequence [sequence omitted]

SEQ ID NO: 452 - protein, 315 aa, Artificial Sequence
  Synthetic
MFSPNHTIVTEFILLGLTDDPVLEKILFGVFLAIYLITLAGNLCMILLIRTNSHLQTPMYFFLGHLSFVDICYSSNVTPNMLHNFLSEQKTISYAGCFTQCLLFIALVITEFYILASMALDRYVAICSPLHYSSRMSKNICVCLVTIPYMYGFLSGFSQSLLTFHLSFCGSLEINHFYCADPPLIMLACSDTRVKKMAMFVVAGFNLSSSLFIILLSYLFIFAAIFRIRSAEGRHKAFSTCASHLTIVTLFYGTLFCMYVRPPSEKSVEESKITAVFYTFLSPMLNPLIYSLRNTDVILAMQQMIRGKSFHKIAV

SEQ ID NO: 453 - protein, 315 aa, Artificial Sequence [sequence omitted]

SEQ ID NO: 454 - protein, 315 aa, Artificial Sequence
  Synthetic
MPSLNNTAVMDFILVGLTDSPVLGRILFVVFLVIYLITLTGNLCMIVLIRTNSHLQTPMYFFLGHLSFVDICYSSNVTPNMLHGFISDQKIISYAGCFTQCLLFIALVITEFYLLASMALDRYVAICSPLHYSTRMSKNVCFSLVSFSYVFGFLNGLSQTLLTFHLSFCGSHEINHFYCADPPLIMLACSDTHVKKMAMFVVAGFTLISSLSIILFSYLYIFAAIMRIRSAEGRQKAFSTCGSHLTTVTIFYGTLFCMYLKPPSERSIEESKVIAVFYTFLSPFLNPLIYSLRNKDVINAMKQVIKGNFCQKILV

SEQ ID NO: 455 - protein, 315 aa, Artificial Sequence
  Synthetic
MPSLNNTAVMDFILVGLTDSPVLGRILFVVFLVIYLITLTGNLCMIVLIRTNSHLQTPMYFFLGHLSFVDICYSSNVTPNMLHGFISDQKIISYAGCFTQCLLFIALVITEFYLLASMALDHYVAICSPLHYSTRMSKNVCFSLVSFSYVFGFLNGLSQTLLTFHLSFCGSHEINHFYCADPPLIMLACSDTHVKKMAMFVVAGFTLISSLSIILFSYLYIFAAIMRIRSAEGRQKAFSTCGSHLTTVTIFYETLFCMYLKPPSERSIEESKVIAVFYTFLSPFLNPLIYSLRNKDVINAMKQVIKGNFCQKILV

SEQ ID NO: 456 - protein, 311 aa, Artificial Sequence
  Synthetic
MTFLNHTAMMDFILVGLTDSPVLGRILFVVFLVIFVITLAGNLFMIVLIRTNSHLQTPMYFFLGHLSFVDICYSSNVTPNMLHGFISDQKTISYAGCFTQCLLFIALVITEFYLLASMALDRYVAICSPLHYSTRMSKNVCVSLVAFPYVFGFLNGLSQTLLTFHLSFCGSHEINHFYCADPPLIMLACSDTHVKKMAMFVVAGFTLSSSLAIILLSYLFIFIAILRIRSAKGRQKAFSTCGSHMTTVTIFYGTLFCMYLRPPSEKSVEESKVIAVFYTFLSPMLNPLIYSLRNKDVINAMKQVVKGKLLH

SEQ ID NO: 457 - protein, 314 aa, Artificial Sequence
  Synthetic
MTRKNYTSLTEFVLLGLADTLELQIILFLFFLVIYTLTVLGNLGMILLIRIDSQLHTPMYFFLANLSFVDVCNSTTITPKMLADLLSEKKTISFAGCFLQMYFFISLATTECILFGLMAYDRYAAICRPLLYSLIMSRTVYLKMAAGAFAAGLLNFMVNTSHVSSLSFCDSNVIHHFFCDSPPLFKLSCSDTILKESISSILAGVNIVGTLLVILSSYSYVLFSIFSMHSGEGRHRAFSTCASHLTAIILFYATCIYTYLRPSSSYSLNQDKVASVFYTVVIPMLNPLIYSLRSKEVKKALANVISRKRTSSFL

SEQ ID NO: 458 - protein, 314 aa, Artificial Sequence
  Synthetic
MTRKNYTSLTEFVLLGLADTLELQIILFLFFLVIYTLTVLGNLGMILLIRIDSQLHTPMYFFLANLSFVDVCNSTTITPKMLADLLSEKKTISFAGCFLQMYFFISLATTECILFGLMAYDRYAAICRPLLYSLIMSRTVYLKMAAGAFAAGLLNFMVNTSHVSSLSFCDSNVIHHFFCDSPPLFKLSCSDTILKESISSILAGVNIVGTLLVILSSYSYVLFSIFSMHSGEGRHRAFSTCASHLTAIILFYATCIYTYLRPSSSYSLNQDKVASVFYTVVIPMLNPLIYSLRNKEVKKALANVISRKRTSSFL

SEQ ID NO: 459 - protein, 311 aa, Artificial Sequence
  Synthetic
MGRRNNTNVADFILMGLTLSEEIQMALFMLFLLIYLITMLGNVGMILIIRLDLQLHTPMYFFLTHLSFIDLSYSTVVTPKTLANLLTSNYISFTGCFAQMFFFAFLGTAECYLLSSMAHDRYAAICSPLHYTVIMSKRLCLALITGPYVIGFIDSFVNVVSMSRLHFYDSNVIHHFFCDTSPILALSCTDTYNTEILIFIIVGSTLMVSLFTISASYVFILFTILKINSTSGKQKAFSTCVSHLLGVTIFYSTLIFTYLKPRKSYSLGRDQVASVFYTIVIPVLNPLIYSLRNKEVKNAVIRVMQRRQDSR

SEQ ID NO: 460 - protein, 312 aa, Artificial Sequence [sequence omitted]

SEQ ID NO: 461 - protein, 311 aa, Artificial Sequence [sequence omitted]

SEQ ID NO: 462 - protein, 312 aa, Artificial Sequence [sequence omitted]

SEQ ID NO: 463 - protein, 311 aa, Artificial Sequence
  Synthetic
MGRRNNTNVPDFILTGLSDSEEVQMALFILFLLIYLITMLGNVGMILIIRLDLQLHTPMYFFLTHLSFIDLSYSTVITPKTLANLLTSNYISFMGCFAQMFFFVFLGAAECFLLSSMAYDRYVAICSPLRYPVIMSKRLCCALVTGPYVISFINSFVNVVWMSRLHFCDSNVVRHFFCDTSPILALSCMDTYDIEIMIHILAGSTLMVSLITISASYVSILSTILKINSTSGKQKALSTCASHLLGVTIFYGTMIFTYLKPRKSYSLGRDQVASVFYTIVIPMLNPLIYSLRNKEVKNALIRVMQRRQDSR

SEQ ID NO: 464 - protein, 312 aa, Artificial Sequence
  Synthetic
MNTLNYTFKPDFILMGLTDSKEVQLVLSVLFLLIYLVTVLGNIGMILIIRLDVQLHTPMYFFLTHLSFLDLSYSTVITPKTLENLLTSTKNISFMGCFTQMYFFVLLAATECFLLSSMAYDRYVAICKPLHYSVIMSKRFCSALLTGSYVFGAVDSTVNMLCMGTLDFCNSNVIHDFFCDTSPLIALSCSNTHDIEFIIFIFAGSTLLLSLITISASYLSILSTILKISSTSGKQKAFSTCASHILAVTIFYGTMIFTHLKSNKSFSLGKDQVASVFYTIVIPMLNPLIYSLRNKEVKCAIDRIIKKREKGL

SEQ ID NO: 465 - protein, 319 aa, Artificial Sequence
  Synthetic
MNTWNYTKESDFILMGLTDSKEIQLVLTVLFVLIYLVTVLGNAGMMLIIRLDAQLHTPMYFFLSHLSFLDLSYSTVITPKTLQNLLTSTKVISFIGCFTQMYAFVLLAAAECFLLASMAYDRYVAICNPLQYPVIMSTRFCSTLLTGSYMIGTMDSTVNIFCMNTLYFCRTKVIHHFFCDTSPILALSCSDTRNIQIIIFIFAGSTLVVSLITISASYVSILSTILKINSTSGKHKAFSTCASHLLGVTVFYGTLIFTYLKPSNSYYSGKEQVASVFYTIVIPMLNPLIYSLRNKEVKSAIHRVIKKQKGSRLKFRVAL

SEQ ID NO: 466 - protein, 308 aa, Artificial Sequence
  Synthetic
MNPEFMLVGLTDSKEIQLVLSVLFLLIYMLTVLGNIGIILIIHLDVQLHTPMYFFLTHLSFLDLSYSTVITPKTLQNTLTSIKNISFMGCFTQLYFFAFLAGSECFILSSMAYDRYVAICNPLHYPVIMSPRRSYILITVSYIVGAIDSSATVFWLSTLDFCNSTVIHHFFCDTFPILALSCSDTYNAEATIFVLAGSTLLLSLITISASYVSILSTILKINSSSGKHKAFSTCASHLIGVTVFYGTTIFTYLKPSTSYSLGKDQVAPVFYTIVIPMLNPLIYSLRNKEVKSAVVRVMKKRECIQKLK

SEQ ID NO: 467 - protein, 315 aa, Artificial Sequence
  Synthetic
MSACNPTNEPEFMLVGLTDSKEIQLVLSVLFLLIYMLTVLGNIGIILIIHLDVQLHTPMYFFLTHLSFLDLSYSTVITPKTLQNTLTSIKNISFMGCFTQLYFFAFLAGSECFILSSMAYDRYVAICNPLHYPVIMSPRRSYILITVSYIVGAIDSSATVFWLSTLDFCNSTVIHHFFCDTFPILALSCSDTYNAEATIFVLAGSTLLLSLITISASYVSILSTILKINSSSGKHKAFSTCASHLIGVTVFYGTMIFTYLKPSTSYSLGKDQVASVFYTIVIPMLNPLIYSLRNKEVKSAVVRVMKKRECIQKLK

SEQ ID NO: 468 - protein, 315 aa, Artificial Sequence
  Synthetic
MSACNDTNEPEFTLVGLTDSKEIQLVLSVLFLLIYMLTVLGNIGMILIIHLDVQLHTPMYFFLTHLSFLDLSYSTVITPKTLQNTLTSIKNISFMGCFTQLYFFVLLAASECFILSSMAYDRYVAICNPLHYPVIMSPRRSYTLITVSYMIGVLDSSVTVFCLSTLDFCNSKVIHHFFCDTFPILALSCSDTYNAEATIFVLAGSTLLLSLITISSSYVSILSTILKINSSSGKHKAFSTCASHLIGVTVFYGTMIFTYLKPSTSYSLGKDQVASVFYTIVIPMLNPLIYSLRNKEVKSAVVRVMKKRECTQKLK

SEQ ID NO: 469 - protein, 315 aa, Artificial Sequence
  Synthetic
MYTWNHTNMPDFILMGLTDSKEIQLILSVLFLLIYLVTVLGNIGMILIIYIDTQLHTPMYFFLTHLSVVDLSYSTAITPKTLENMLTTNKSISYTNCFAQLYIFILLAATECFLLSSMAYDRYIAICNPLHYPVIMSPRCCLALLTGSYVIGAVDSTLTVFSMITLHFCKSNVIRHFYCDTSPLLSLSCSDTHVVEIIIFIFAGSTILGSLITISGSYVSILSTILNINSTSGKQKAFSTCASHLLGVTVFYSTLIFTYLKPTKSYSLGKEEVASVFYTIVIPMLNPLIYSLRNKEVKSAVVRLVKKRQGSRKLI

SEQ ID NO: 470 - protein, 310 aa, Artificial Sequence
  Synthetic
MAGNNFTEVTVFILSGFANHPELQVSLFLMFLFIYLFTVLGNLGLITLIRMDSQLHTPMYFFLSNLAFIDIFYSSTVTPKALVNFQSNRRSISFVGCFVQMYFFVGLVCCECFLLGSMAYNRYIAICNPLLYSVVMSQKVSNWLGVMPYVIGFTSSLISVWVISSLAFCDSSINHFFCDTTALLALSCVDTFGTEMVSFVLAGFTLLSSLLIITVTYIIIISAILRIQSAAGRQKAFSTCASHLMAVTIFYGSLIFTYLQPDNTSSLTQAQVASVFYTIVIPMLNPLIYSLRNKDVKNALLRVIHRKLFP

SEQ ID NO: 471 - protein, 318 aa, Artificial Sequence
  Synthetic
MAGNNFTEVTVFILSGFANHPELQVSLFLMFLFIYLFTVLGNLGLITLIRMDSQLHTPMYFFLSNLAFIDIFYSSTVTPKALVNFQSNRRSISFVGCFVQMYFFVGLVCCECFLLGSMAYNRYIAICNPLLYSVVMSQKVSNWLGVMPYVIGFTSSLISVWVISSLAFCDSSINHFFCDTTALLALSCVDTFGTEMVSFVLAGFTLLSSLLIITVTYIIIISAILRIQSAAGRQKAFSTCASHLMAVTIFYGSLIFTYLQPDNTSSLTQAQVASVFYTIVIPMLNPLIYSLRNKDVKNALLRVIHRKLFPERPLEQTD

SEQ ID NO: 472 - protein, 310 aa, Artificial Sequence
  Synthetic
MTENNFTKVTVFMFSGFSDHPELQVSLFLIFLFIYLFTVWGNIGLILLIRIDSQLHTPMYFFLSNLAFIDIFYSSTVTPKALVDFQSTQKSISFVGCFVQMYFFVGLVCSECFLLGSMAYDRYVAICNPLLYSVIMSQKVCNWLAVIPYMIGFTNSLISICVISSLPLCDPYINHFFCDTTALLALSCVDAFSTELVIFVLAGFTLLSSLLIITFTYVTIISAILRIQSAAGRWKAFSTCASHLTGVTVFYGSLIFTYLQPDNTSSLTQAQVASVFYTIVIPMLNPLIYSLRNKDVKNALLRVIHRKHLL

SEQ ID NO: 473 - protein, 310 aa, Artificial Sequence
  Synthetic
MTENNFTKVTVFMFSGFSDHPELQVSLFLIFLFIYLFTVWGNIGLILLIRIDSQLHTPMYFFLSNLAFIDIFYSSTVTPKAVVDFQSTQKSISFVGCFVQMYFFVGLVCSECFLLGSMAYDRYVAICNPLLYSVIMSQKVCNWLAVIPYMIGFTNSLISICVISSLPLCDPYINHFFCDTTALLALSCVDAFSTELVIFVLAGFTLLSSLLIITFTYVTIISAILRIQSAAGRWKAFSTCASHLTGVTVFYGSLIFTYLQPDNTSSLTQAQVASVFYTIVIPMLNPLIYSLRNKDVKNALLRVIHRKHLL

SEQ ID NO: 474 - protein, 314 aa, Artificial Sequence
  Synthetic
MGILKDGNHTAVTEFILLGLTDDPVLKVVLFTIILCIYLVTVSGNLSTILLIRVSSQLHHPMYFFLSHLASVDIGISSSVTPNMLVNFLLERSTISYLGCGIQLGSGAFFGSTESFLLAAMAYDHFMAICNPLLYSTKMSTQVCIQLLVGSYIGGFLNASSFILSFFSFLFCGPNKVNHFFCDFTPLVELSCSDNSVLLILDSFSAGSIIVITVLVIAISYTYILITILKMHSTEGRHKAFSTCTSHLTAVTVFYGTVTFIYVMPKSSYSTDQNKVLSVFYAIAIPMLNPLIYSLRNNEIKNALKRQLSKKTFS

SEQ ID NO: 475 - protein, 314 aa, Artificial Sequence
  Synthetic
MAFLEDGNHTVVTEFILLGLTDDPVLRVILFIIILCIYLVTVSGNLSTILLIRVSSQLHHPMYFFLSHLASIDIAISSSVTPNMVVNFLVERSSISYIGCGIQLGSAVFFGAIECFLLAVMAYDRFVAICNPLLYSTKMSKQVCIQLLVGSYIGGFIHASFFTLSFVSFLFCGPNRINHFFCDFTPLVELSCSDNSVLIILDSFSTGTIIVITVFVIAISYTCILITILKMHSTEGRHKAFSTCTSHLTVVTLLYGTVTFIYVMPKSSYSTDQNKVISVFYMVVIPMLNPIIYSLRNNEIKGALKKQLGEKNIF

SEQ ID NO: 476 - protein, 314 aa, Artificial Sequence
  Synthetic
MAFLEDGNHTALTEFILLGLTDEPVLRVVLFTIILCIYLVTVSGNLSTILLIRVSSQLHHPMYFFLSHLASADIGYSSSVTPNMLVNFLVEKNTITYLGCGIQLGSGAFFGTVECFVLAAMAYDRFVAICSPLLYSTKMSIQVCIQLLVVAYISGFLNASSFTLSFFTFFFCGPNIINHFFCDFTPLVELSCSDDRVSIILATISVGTVIFITVLIIVVSYIYILITILKMHSTEGRHKAFSTCTSHLTAVTLFYGTVTFIYVMPKSNYSTDQNKVVSVFYMVVIPMLNPLIYSLRNNEIKGALKRQLGRKIFS

SEQ ID NO: 477 - protein, 314 aa, Artificial Sequence
  Synthetic
MAFLEVGNHTAVTEFILLGLTDDPVLRVVLFTIILCIYLVTVMGNLSTILLIRVSSQLHHPMYFFLSHLASVDMGLSSSVTPNMLLNFLIERNTISYLGCGIQQSLADFFGSVECFLLAAMAYDRFMAICNPLLYSTKMSTKVCVQLVVGSYIGGFLNASLIMFYFFSFLFCGPNRVDHFFCDFAPLVELSCSDVSVSVIVISFSAGSVTMITVFVIAVSYSYILITILKMHSIEGRHKAFSTCTSHLTAVTLYYGTITFIYVMPKSSFSTDQNKVVSVFYMVMIPMLNPLIYSLRNNEIKGAIKRQLGKKMSC

SEQ ID NO: 478 - protein, 314 aa, Artificial Sequence
  Synthetic
MAFLQDGNHTAVTEFILLGLTDDPVLRVVLFTIILCIYLVTVFGNLSTILLIRVSSQLHHPMYFFLSHLASVDIGISSSVTPSMLVNFLLERSTISYLGCGIQLGSADFIASVECFLLAAMAYDRFMAVCNPLLYSTKMSTQVCVQLVVGSYIGGFLNSLIVTVYFFSFLFCGPNRIDHFFCDFAPLAELSCSDVSVSVLIISFSAGSVTMITVFVIVISYSYILITILKMHSTEGRHKAFSTCTSHLTAVTLYYGTITFIYVMPKSSFSTDQNKVVSVFYMVMIPMLNPLIYSLSNNEIKGALKRQLGMKTLS

SEQ ID NO: 479 - protein, 314 aa, Artificial Sequence
  Synthetic
MAFLQDGNHTAVTEFILLGLTDGPILRVILFTIILCIYLVTVSGNLSTILLIRVSSQLHHPMYFFLSHLASVDMGLSSSVTPNMLVNFLVKQNTISYIACSIQFGLAAFFGTVECFLLAAMAYDRFVAICNPLLYSTKISTESCIQLVVGSYIGGFLNASSFILSFFSFIFCGPNRINHFYCDLAPLVELSCSDVSVSVVVTSFSAGSVTVITVFVIAVSYSYILITILKMHSTEGRHKAFSTCTSHLTAVTLYYGTITFIYVMPKSSYSTDQNKVVSVFYMVVIPMLNPLIYSLRNNEIKGAIKRQLGKKMFC

SEQ ID NO: 480 - protein, 314 aa, Artificial Sequence
  Synthetic
MAFLHNGNHTAVTEFILLGLTDDPVFRVILFTIILCIYLVTVSGNLSTILLIRVSSQLHHPMYFFLSHLASVDIGYSSSVTPNMLANFLVEKNTISYLGCTIQLSLAAFCGTVECFLLATMAYDRFMAICSPLLYSTKMSTQVCIQLIVGSYIGGFLNASSFTLFFLSFLFCGPNRINHFYCDFAPLVALSCSDVSVSEVVTSFFSGSVTMITMLVIAISYTYILITILKMRSTEGRHKAFSTCTSHLTAVTLFYGTITFIYVMPKSSFSTDQNKVVSVFYMVVIPMLNPLIYSLRNNEIKDALKRHLGKKIFS

SEQ ID NO: 481 - protein, 322 aa, Artificial Sequence
  Synthetic
MAFLEDGNHTAVTEFILVGLTDDPVLKVILFTIILCIYLVTVSGNLSTILLIRVSSQLHHPMYFFLSHLASVDLGYSSSVTPNMLINFLAENNTISYIGCSIQFGSATFFGVLECFLLAVMAYDRFVAICNPLLYSIKMSTQVCVKLVVGSYIGSSLNASFVTVSIFNLLFCGPNKINHFFCDFDPLIELSCSDVSVPVAVTSCSAGLITMITVFVIAVSYTYILITVLKMRSTEGRHKAFSTCTSHLTAVTLFYGTVTFIYVMPKSNYSTDQNKVVSVFYMVVIPMLNPLIYSLRNNEIKGALKRQLGKKIFSQSNILFCK

SEQ ID NO: 482 - protein, 321 aa, Artificial Sequence
  Synthetic
MAFLHNGNHTAVTEFILLGLTDDPVLRIVLFTIILCIYLVTVSGNLSTILLIRVSSQLHHPMYFFLSHLASADIGYSSSVTPNMLVNFLVKQNTISYIGCSIQFGSAAFFGGLECFLLAVMAYDRFVAICNPLLYSTKMSTQVCVQLVVGSYIGGFLNASFATVSFLFLFFCGPNIINHFFCDFAPLIELSCSDVRISVLVTSFSAGTVTMLTVLVIAISYTYILITILKMRSTEGRHKAFSTCTSHLTAVSLFYGTITFIYVMPKSRYSTDQNKVVSVFYMVVIPMLNPLIYSLRNNEIKGALRRHLGKKIFSQSNILFY

SEQ ID NO: 483 - protein, 314 aa, Artificial Sequence
  Synthetic
MAFLENGNHTAVSEFILLGLTDDPVLRIVLFTIILCIYLVTVSGNLSTILLIRVSSQLHHPMYFFLSHLASADIGLSSSVTPNMLVNFLVERSTISYLGCGIQLSSAALFGATECFLLAAMAYDRFMAICNPLLYSTKMSTKVCVQLIVGSYIAGFLNASSFLLSFFSLLFCGQNIINDFFCDFAPLAELSCSDVSVFVVVISFSAGTVTMLTVFVIAISYSYILITILKMRSTEGRQKAFSTCTSHLTAVTLFYGTVTFIYVMPKSSYSMDQNKIISVFYMVVVPMLNPLIYSLRNNEIKGALKRHFDRKTFS

SEQ ID NO: 484 - protein, 314 aa, Artificial Sequence
  Synthetic
MAFLEDGNHTAVTGFILLGLTDDPVLRVVLFVIILCIYLVTVSGNLSTILLIRVSSQLHHPMYFFLSHLASADIGYSSSVTPNMLVNFLVERNTISYLGCGIQLGSAVFFGTVECFLLAAMAYDRFIAICSPLLYSNKMSTQVCVQLLVGSYIGGFLNASSFTLSFFSLVFCGPNRVNHFFCDFAPLVKLSCSDVSVPAVVPSFTAGSIIIVTIFVIAVSYIYILITILKMRSTEGRQKAFSTCTSHLTAVTLFYGTITFIYVMPKSSYSTDQNKVVSVFYMVVVPMLNPLIYSLRNKEIKGALKRQLAKNTFS

SEQ ID NO: 485 - protein, 314 aa, Artificial Sequence
  Synthetic
MAFQEDGNHTAVTEFVLFGLTDDPVLRVILFIIFLCIYLVTVSGNLSTILLIRVSSQLHHPMYFFLSHLAFADIGYSSSVTPNMLVNFLVERHTISYIGCAIQLGSVVFFGSSECFILAAMAYDRFMAICNPLLYSTKMSTQVCVQLLLIAYIGGFLNTWSFTICFYSLVFCGPNGVNHFFCDFAPLIELSCSDVSVPATVPSFTAGSIIVVTVIVIAISYIYILITILKMHSTEGRQKAFSTCTSHLTAVTLFYGTITFIYVMPKSSFSTDQNKVVSVFYMVVIPMLNPLIYSLRNNEIKGALKRQIGRKIFS

SEQ ID NO: 486 - protein, 314 aa, Artificial Sequence
  Synthetic
MAFLEDGNHTAVTEFVLFGLTDDPVLRVILFIIFLCIYLVNVSGNLSTILLIRVSSQLHHPMYFFLSHLASVDVGYSSTVTPKMLANFLLERSTISYLGCTIQLFSGAFVGTLECFLLATMAYDRFIAICNPLLYSTKMSTQVCIQLLVGSYIGGFLNASSFLLSFFPLLFCGPNRVNHYSCDLTPLIELSCSGSNVPIVPASFCSAFVIIVTVSVIAISYTYILITILKMRSTEGRQKAFSTCTSHLTAVTLYYGTVTFIYVMPKSSYSTDQNKVVSVFYTVVIPMLNPIIYSLRNNEIKGALKRQLARKIFS

SEQ ID NO: 487 - protein, 322 aa, Artificial Sequence
  Synthetic
MAFLEDGNHTTVTEFFLLGLTDDPVLRDILFIIILCIYLVTVSGNLSTILLIRVSSQLHHPMYFILSHLASVDIGISSSVTPNMLATFLVKQNTISYIGCSIQFTSAAFFGTVECFLLATMAYDRFVAICNPLLYSTKMSTEACIQLVVGSYIQGFLNASFFTLSFFSLFFCGPNRINDFYCDFAPLLELSCSDVTVAVVITSISAGFITLTTVFVIAISYSCIFITIMKMHSTESRCKAFSTCTSHLTAVILFYGTAIFIYVMPKSSYSTDQNKVLSIFYTVVIPMLNPLIYSLRNNEIKEALKRHLGKKVFSYGNLFCKT

SEQ ID NO: 488 - protein, 314 aa, Artificial Sequence
  Synthetic
MAFIYNGSQTTVTEFILLGLTDDPVLKVILFCIILCIYLVTVFGNLSTILLIGVSSKLHHPMYFFLSHLASVDMGLSSSVTPNMLVNFLTEKNTISYLGCGIQLSSAAFFGAVEFFLLAAMAYDRLVAICNPLLYSTKMSSQVCIQLVAGSYVGGFLNASFVTHFFFSFLFCGPNRVNHFFCDLSPMMELSCSDVSISEIVISFSAGSFTMTTLFVIVIPYFYIFITILKIRSTEGRQKAFSTCTSHLTAVTLYYGTIIFIYVMPKSTYSRDQNKVVSLFYMLVIPVLNPLIYSLRNNEIKDALKRQFYRKTLL

SEQ ID NO: 489 - protein, 314 aa, Artificial Sequence
  Synthetic
MAFIYNGSQTTVTEFILLGLTDDPVLKVILFSIILCIYLVTVFGNLSTILLIGVSSKLHHPMYFFLSHLASVDMGLSSSVTPNMLVNFLTEKNTISYLGCGIQLSSAAFFGAVEFFLLAAMAYDRLVAICNPLLYSTKMSTQVCIQLVVGTYVGGFLNASFVTHFFFSFLFCGPNRVNHFFCDLSPMMELSCSDVSISEIVISFSAGSFTMTTLFVIVISYFYIVITILKMHSTEGRQKAFSTCMSHLTAVTLYYGTTIFIYVMPKSIYSRDQNKVVSLFYVVVIPVLNPLIYSLRNNEIKDALKRQFYRKTLL

SEQ ID NO: 490 - protein, 315 aa, Artificial Sequence
  Synthetic
SYGFPGQWNHTAVTEFILLGLTDDPVLRVILFSIILCIYLVTVSGNLSTFLLIRVSSQLHHPMYFFLSHLASVDMGLSSSVTPNMLVNFLTERHSISYLGCGIQLSSAAFFGAVEFFLLAVMAYDRFIAICNPLLYSTKLSTQVCIQLVVGSYVGGFLNASFVTHFFFSFFFCGPNRVNYFFCDFPPMMELSCSDVSVSGIVISFTAGSISMTTLFVIVISYFYILITILKMHSTEGRQKAFSTCTSHLTAVTLSYGTATFIYVMPKSTYSGDQNKVVSVFYTVAIPMLNPLIYSLRNNEIKDALKRQFYRKTLL

SEQ ID NO: 491 - protein, 313 aa, Artificial Sequence
  Synthetic
MAFLDNGNHTAVTEFILLGLTDDPFLRIVLFSIILCIYLVTVFGNLSTILLIRVSSQLHHPMYFFLSHLATVDLGISSSVTPSMLVNFLAERSTISYLGCGIQLSSAALFGTLECFLLAVMAYDRFMAICNPLLYSTKLSTRFCIQLVVGSYIGAFLNDSCYISFAFFLFCGPNKVDHFFCDLSPMMELSCSDASVSGVVISFTAGSITMTTLIVIVISYFYILITILKMRSTEGRQKAFSTCTSHLTAVTLYYGTIIFIYVMPKSTYSRDQNKVVSLFYMVVIPMLNPLIYSLRNNEIKGALKKQFYRKTLL

SEQ ID NO: 492 - protein, 315 aa, Artificial Sequence
  Synthetic
MNSLKDGNHTALTGFILLGLTDDPILRVILFMIILSGNLSIIILIRISSQLHHPMYFFLSHLAFADMAYSSSVTPNMLVNFLVERNTVSYLGCAIQLGSAAFFATVECVLLAAMAYDRFVAICSPLLYSTKMSTQVSVQLLLVVYIAGFLIAVSYTTSFYFLLFCGPNQVNHFFCDFAPLLELSCSDISVSTVVLSFSSGSIIVVTVCVIAVCYIYILITILKMRSTEGHHKAFSTCTSHLTVVTLFYGTITFIYVMPNFSYSTDQNKVVSVLYTVVIPMLNPLIYSLRNKEIKGALKRELVRKILSHDACYFSR

SEQ ID NO: 493 - protein, 310 aa, Artificial Sequence
  Synthetic
MEPGNHTAVTKFILLGLTDDPTLCVIFFVFFLGIYIVTLVGNISIINLVRSCPQLQTPMYMFLSHLAFVDIGYSTSVTPIMLIGFIVHETGLPVHACEAQLCSVVTFGTAECFLLAAMAYDRYVAICSPLLYSTHMSSQICLLLVGASYVGGCVNAWTFTGCLLSLSFCGPNKIDHFFCDFSPLLKLSCSDVSIIGIIPSISAGSIIVVTVFVISVSYIYILITILKMRSTEGRHKAFSTCTSHLTAVTLYYGTITFIYVMPKSSYSTKQNRVVSLFYTVVIPMLNPLIYSLRNRDVKEALRKATLRIYS

SEQ ID NO: 494 - protein, 310 aa, Artificial Sequence
  Synthetic
MEAQNHTTVKEFILLGLTENSTLRVILFMIFLGIYTVTLVGNFSIISLIRSCPQLHTPMYLFLSHLALVDIGFSTSITPIMLTGFLGHTVTLSVAACVAQFCIAVTFGTVECFLLAVMAYDRYVAICSPLLYSTHMSPRICFLLVGASYVGGCVNSGTFTSCLLILSFCGPNQIDHFFCDFPAVLKLSCSDVSIIGIIPSISAGSIIVITVFVIAVSYTYILITILNMRSTEGRHKAFSTCTSHLTAVTLYYGTITFIYVMPKSNYSTAQNKILSVFYTVVIPMLNPLIYSLRNRDVKEALRKAIIRIFP

SEQ ID NO: 495 - protein, 310 aa, Artificial Sequence
  Synthetic
METQNHTTVTEFILLGLTESSTLRVILFMVFLGIYTVTLVGNFSIISLIRSCPQLHTPMYLFLSHLAFVDIGFSTSITPTMFKGFLGNRLVLSVAACIAQFCITVTFGTVECFLLAVMAYDRYVAICSPLLYSTHMSPRICFLLVGASYVGGCVNSGAFTSCLSILSFCGPNQIDHFFCDFPAVLKLSCSDVSIIGIIPSISAGSIIVITVFVIAVSYAYILITILKMRSTEGRQKAFSTCTSHLTAVTLYYGTITFIYVMPKSNYSTAQNKILSVFYTVVIPMLNPLIYSLRNRDVKEALRKAIIRIFP

SEQ ID NO: 496 - protein, 310 aa, Artificial Sequence
  Synthetic
MEAENHTTVAELIILGLTEDPKLCIVFFVIFLGVYIVTLVGNISIITLIRISSQLHTPMYLFLSHLAFVDILYSTSVSVIMHMELLGHGLALPVAACAAQLCITVSFGSAECFLLAAMAYDRYVAICSPLLYSTLMSPRVCFLLLGMSYVGGCMNGWTFTGCLLSLSFCGPNQIDHFFCDFSPLLKLSCSDVSIIGIIPSISSGSIIVVTVFVIAVSYIYILITILNMRSTEGRHKAFSTCTSHLTAVTLYYGTITFIYVMPKSNYSTEQNKVLSVFYTVVIPMLNPLIYSLRNRDVKEALRKATVRVYS

SEQ ID NO: 497 - protein, 310 aa, Artificial Sequence
  Synthetic
MEAENHTTVAELIILGLTEDPKLCIVFFVIFLGVYIITLVGNISIITLIRISSQLHTPMYLFLSHLAFVDIVFSTSVSVIMLMELLGHGLVLSVATCAAQLCMTVSFGSAECFLLAAMAYDRYVAICSPLLYSTLMSSRVCFLLLGISYVGGFVNGWTFTGCVLSLSFCGPTQINHFFCDFSPLLKVSCSDVSIIGIIPSISSGSIIVVTVFVIAVSYIYILITILKMRSTEGRHKAFSTCTSHLTAVTLFYGTITVIYVMPKSSYSTEQNKVISLFYTVVIPMLNPLIYSLRNRDVKDALRKAIVRVYS

SEQ ID NO: 498 - protein, 310 aa, Artificial Sequence
  Synthetic
MNGGNHTSMTELFILGPTEDPTFCIAFFVIFLGVYMVTLVGNISIITLIRISSQLHTPVYLFLNHLAFVDILYSTLVSVIMLMELLEHELALPVAACAAELCITVLFGSSECFLLAAMAYDCYVAICSPLLYSTLMSSRVCFLLLGMSYVGGCMNGWIFTGCLLNLSFYGPYQIDHFFCDFSPLLKLSCSDVSIIGIIPSISSGSIIVVTVLVIAVFYICILMTILKMHSTDGCHKAFSTCNSYLTAVTLYYGTITFIYVMPKSNYSTEKNKVLSEFYTVVIPMLNHLIYSLKNRDVKDALRKAIVRVYT

SEQ ID NO: 499 - protein, 310 aa, Artificial Sequence
  Synthetic
MEPGNYTVVTEVILLGFTEDAIIRAILFIVFLIIYSVTLMGNASIIMLIRRSPQLHTPMYLLLSHLAFVDIGYSSSVTPIMLKGFLRKETFILVSGCVAQLCSVVTFGSTECFLLAAMAYDRYVAICSPLLYATQMSSTVCILLVGASYLGGCVNAWTFTGCLLNLSFCRPNKVNHFFCDYSPLLKISCSHDFSSEVIPAISSGSIIVVTVFIIALSYVYILVSILKMRSTEGRQKAFSTCTSHLTAVTLFYGTITFIYVMPKSSYSTDQNKVVSVFYTVVIPMLNPIIYSLRNKDVKEAMKKLMANTHH

SEQ ID NO: 500 - protein, 310 aa, Artificial Sequence; identical to SEQ ID NO: 499
  Synthetic

SEQ ID NO: 501 - protein, 312 aa, Artificial Sequence
  Synthetic
MEPGNYTVVTEFILLGLTDDITVSVILFVMFLIVYSVTLMGNLNIIVLIRTSPQLHTPMYLFLSHLAFLDIGYSSSVTPIMLRGFLRKGTFIPVAGCVAQLCIVVAFGTSESFLLASMAYDRYVAICSPLLYSTQMSSTVCILLVGTSYLGGWVNAWIFTGCSLNLSFCGPNKINHFFCDYSPLLKLSCSHDFSFEVIPAISSGSIIVVTVFIIALSYVYILVSILKMRSTEGRQKAFSTCTSHLTAVTLFFGTITFIYVMPQSSYSTDQNKVVSVFYTVVIPMLNPLIYSFRNKEVKEAMKKLIAKTHWWS

SEQ ID NO: 502 - protein, 311 aa, Artificial Sequence
  Synthetic
MGTGNDTTVVEFTLLGLSEDTTVCAILFLVFLGIYVVTLMGNISIIVLIRRSHHLHTPMYIFLCHLAFVDIGYSSSVTPVMLMSFLRKETSLPVAGCVAQLCSVVTFGTAECFLLAAMAYDRYVAICSPLLYSTCMSPGVCIILVGMSYLGGCVNAWTFIGCLLRLSFCGPNKVNHFFCDYSPLLKLACSHDFTFEIIPAISSGSIIVATVCVIAISYIYILITILKMHSTKGRHKAFSTCTSHLTAVTLFYGTITFIYVMPKSSYSTDQNKVVSVFYTVVIPMLNPLIYSLRNKEIKGALKRELRIKIFS

SEQ ID NO: 503 - protein, 311 aa, Artificial Sequence; identical to SEQ ID NO: 502
  Synthetic

SEQ ID NO: 504 - protein, 306 aa, Artificial Sequence
  Synthetic
MEPGNHTMVTEFIILGLTENPTLCCIFFVLFLGVYLTTILGNVSIIMLIRRSPQLHTPMYLFLSHLAFVDIGYSSSVTPVMIVSFLRERTAIPVAGCIVQLGSDVVFGTAECFLLAAMAYDRYVAICSPLLYSTLMSPKVCLILLVISYVGGCVNSSSFTSCLLSLTFCGPNKVNHFFCDLPPLVELSCTHVYVAEMSPAISAGSIIVITLFVIIISYVYILHSILRMRSTEGRHKAFSTCTSHLTAVTLFYGTVTFVYVIPESSHSPNKIKVVSVFYTVVIPMLNPLIYSLRNKEVKEAMRKLMA

SEQ ID NO: 505 - protein, 305 aa, Artificial Sequence
  Synthetic
MVTEFIILGLTEVPTLCCIFFVLFLGVYITTILGNVSIIMLIRRSPQLHTPMYLFLSHLAFVDIGYSSSVTPVMIVSLLRERTAIPVAGCIVQLGSDVVFGTAEFFLLAAMDYDRYVAICSPLLYSTLMSPKVCLILLVISYMGGCVNSSSCTSCLLSLTFCGPNKVNHFFCDLPPLVELSCTHVYVAEMSPAISAGSIIVITLFVIIISYVYILHSILRMHSTEGRHKAFSTCTSHLTAVTLFYGTVTFVYVIPKSSHSPNQIKVVSVFYTVVIPMLNPLIYSLRYKEVKEAMRKLMAKTHSSF

SEQ ID NO: 506 - protein, 309 aa, Artificial Sequence
  Synthetic
MTLGNSTEVTEFYLLGFGAQHEFWCILFIVFLLIYVTSIMGNSGIILLINTDSRFQTLTYFFLQHLAFVDICYTSAITPKMLQSFTEEKNLMLFQGCVIQFLVYATFATSDCYLLAMMAVDPYVAICKPLHYTVIMSRTVCIRLVAGSYIMGSINASVQTGFTCSLSFCKSNSINHFFCDVPPILALSCSNVDINIMLLVVFVGSNLIFTGLVVIFSYIYIMATILKMSSSAGRKKSFSTCASHLTAVTIFYGTLSYMYLQSHSNNSQENMKVAFIFYGTVIPMLNPLIYSLRNKEVKEALKVIGKKLF

SEQ ID NO: 507 - protein, 313 aa, Artificial Sequence
  Synthetic
LLLAMTLGNSTEVTEFYLLGFGAQHEFWCILFIVFLLIYVTSIMGNSGIILLINTDSRFQTLTYFFLQHLAFVDICYTSAITPKMLQSFTEEKNLILFQGCVIQFLVYATFATSDCYLLAMMAVDPYVAICKPLHYTVIMSRTVCIRLVAGSYIMGSINASVQTGFTCSLSFCKSNSINHFFCDVPPILALSCSNVDINIMLLVVFVGSNLIFTGLVVIFSYIYIMATILKMSSSAGRKKSFSTCASHLTAVTIFYGTLSYMYLQSHSNNSQENMKVAFIFYGTVIPMLNPLIYSLRNKEVKEALKVIGKKLF

SEQ ID NO: 508 - protein, 298 aa, Artificial Sequence
  Synthetic
MGRGNSTEVTEFHLLGFGVQHEFQHVLFIVLLLIYVTSLIGNIGMILLIKTDSRLQTPMYFFPQHLAFVDICYTSAITPKMLQSFTEENNLITFRGCVIQFLVYATFATSDCYLLAIMAMDCYVAICKPLRYPMIMSQTVYIQLVAGSYIIGSINASVHTGFTFSLSFCKSNKINHFFCDGLPILALSCSNIDINIILDVVFVGFDLMFTELVIIFSYIYIMVTILKMSSTAGRKKSFSTCASHLTAVTIFYGTLSYMYLQPQSNNSQENMKVASIFYGTVIPMLNPLIYSLRNKEGK

SEQ ID NO: 509 - protein, 302 aa, Artificial Sequence
  Synthetic
LLVVMGRGNSTEVTEFHLLGFGVQHEFQHVLFIVLLLIYVTSLIGNIGMILLIKTDSRLQTPMYFFPQHLAFVDICYTSAITPKMLQSFTEENNLITFRGCVIQFLVYATFATSDCYLLAIMAMDCYVAICKPLRYPMIMSQTVYIQLVAGSYIIGSINASVHTGFTFSLSFCKSNKINHFFCDGLPILALSCSNIDINIILDVVFVGFDLMFTELVIIFSYIYIMVTILKMSSTAGRKKSFSTCASHLTAVTIFYGTLSYMYLQPQSNNSQENMKVASIFYGTVIPMLNPLIYSLRNKEGK

SEQ ID NO: 510 - protein, 312 aa, Artificial Sequence
  Synthetic
MTQGNGTEVTDFYLLGFGVERDIQCVLFIVFLVIYVTSMVGNTGMILLINTDSRLQTPMYFFLQHLAFVDICYTSAITPKMLQNFMVEDKSITFKGCVIQLFIYAVFATSDCYLLAVMAVDRYVAICKPLRYPIIMSRQVCVQLVAVSYLMGSINSSVHTGFTFSLSFCASKINHFFCDIPPIVTLSCYNNDINFMLILIFVGFNLTFTVSVVILSYIYIMAAILKMSSTAGRKKTFSTCASHLTAVTIFYGTLAYMYLQPPSDNSEENMKVASVFYGIVIPMLNPLIYSLRNKEVKDAIKATGKKKLDLNY

SEQ ID NO: 511 - protein, 314 aa, Artificial Sequence
  Synthetic
MIQYNETEVKGFYLLGFGVQHDIQCFLFIVFLIIYMTSMVGNTGMILLIHTDSRLQTPMYFFLQHLAFVDICYTSAITPKMLQTFVVEDRYISFGGCVVQLLIYAIFATCDCYLLAAMAVDRYVAICKPLRYPILMSRKVCIQMVAGSYLIGSINSSVHTGFTFSLSYCKSNHINHFFCDVPPIISLSCSNIETNIKILVIFVGFNLIFTVLVVIFSYMYIMAAILKMSSTAGRKKTFSTCASHLTAVTIFYGTLAYMYLQPHSDNSEENMKVASVFYGIVIPMLNPLIYSLRNKEVKDAIKLTKKKLFRFDTQ

SEQ ID NO: 512 - protein, 309 aa, Artificial Sequence
  Synthetic
MKHSNDSKVTEFILLGFAGQNESWHILFVVFLVIYIATLVGNIGMILLIKLHSSLHTPMYFFLQHLAFVDLCYSSAITPRTLQNFVSTKPSISFTGCLAQLLVYGIFVTSDCFILAAMAVDRYVAICNPLRYPIIMSQRLCILLLLGSYTMGFLNATVNTGFTFLSNFCKSNVINHFFCDVPPILALSCSSIDLNIMVLTIFVGFNLTFTVSVVILSYTFILAAILRMSSASGRRKAFSTCASHMTAVTIFYGTLSYMYVLHGTNRSQEQEKVASVFYGIMIPMLNPLIYSLRNQDVIEALRHIGNKCF

SEQ ID NO: 513 - protein, 309 aa, Artificial Sequence; identical to SEQ ID NO: 512
  Synthetic

SEQ ID NO: 514 - protein, 292 aa, Artificial Sequence
  Synthetic
MEQSNDTKVTEFILLGFAGQHKSWHILFIIFLMIYVVTLMGNIGMIVLIKIDSSLHTPMYFFLQHLAFVDLCYTSAITPKMLKNFTETKASISFIGCMLQLLAYGTFATIDCFILAAMAVDRYVAICNPLRYPIVMSQRLCILLLVGSYTMGFLNASVNTSFTFSLKFCKSNAINHFFCDEPPILALSCSSIDFSIMLLTVFVGFNLLSTVLVVIFSYIYILSAILRMSSAAGRKKAFSTCASHLTAVTIFYGTLAYMYLHPHTNDSQEQEKAASVFYGIIIPMLNPLIFIV

SEQ ID NO: 515 - protein, 314 aa, Artificial Sequence
  Synthetic
VMKQMVTESNSSVTEFILMGLTVQKELQLPLFILFLLNYTATVVGNLSLMNLICLNSHLHTPMYFFIFNLSCIDFCYSFVSNPTMLRSFVTEQNTISYEGCMSQLFFFCFFVNSECYVLTAMAYDRYVAICHPLKYTTVMSPKICCLLVFGSYLMGFAGALTHTGFMIRLSFCNSNIINHYMCDIFPLLQLSCTSTYVNELVSSAVVGTIIILSSIIILVSYAMILSNILHMSSSKGWSKALGTCGSHIITVSLFYGSGLLAYIKPTSAETVDQGKFLSIFYTLVVPMLNPLIYSLRNKDVKLALKRTMKRVTT

SEQ ID NO: 516 - protein, 307 aa, Artificial Sequence
  Synthetic
MKQMVSESNYSVTEFIFMGLTVQREFQLPLFVLFLLNYTATVVGNLSLMNLICLNSHLHTPMYFFIFNLSCIDFCYSFVSNPTMLRSFVTEQNTISYEGCMSQLFFFCFFVNSECYVLTAMAYDRYVAICHPLKYTTVMSPKICCLLVFGSYLMGFAGALTHTGFMIRLSFCNSNIINHYMCDIFPLLQLSCTSTYVNELVSSAVVGTIIILSSIIILVSYAMILSNILHMSSSKGWSKALGTCGSHIITVSLFYGSGLLAYIKPTSAETVDQGKFLSIFYTLVVPMLNPLIYSLRNKDVKLALKRQ

SEQ ID NO: 517 - protein, 313 aa, Artificial Sequence
  Synthetic
MKQMVSESNYSVTEFIFMGLTVQREFQLPLFVLFLLNYTATVVGNLSLMNLICLNSHLHTPMYFFIFNLSCIDFCYSLVCNPTMLMSFVSEHNTISYAGCMSQLFLFCFFANSECYVLTAMAYDRYVAICHPLKYTTVMSPKICSLLVFGSYLMGFAGAMTHTGFMIRLSFCNSNIINHYMCDIFPLLQLSCTSTYVNELVSSAVVGTIIILSSLIILVSYAMILSNILHMSSSKGWSKALGTCGSHIITVSLFYGSGLLAYVKPSSAETVGQGKIFSVFYTLVVPMLNPLIYSLRNKDVKLAVKRTMKRVTS

SEQ ID NO: 518 - protein, 313 aa, Artificial Sequence
  Synthetic
MMQMTMENKSSVSEFILMGLTDQPELQLPLFVLFLMNYTATVMGNLSLMNLICLNSNLHTPMYFFIFNLSFIDFCYSMVFTPKMLMSFVVEKNTISFRGCMTQLFFFCVFINAESYVLTAMAYDRYVAIGQPLMYQVVMSPKICCLLIFGSYLMGFISATAHTGCMVRLRFCDSNIINHYMCDIFPLLQLSCSSTYVNELMSYIAVGTAIILCSLIILVSYAMILFNIIHISSGKGWSKALGTCGSHIITVSLFYGSGLLAYVNPSSAETVGQAKFFSVFYTLLVPMLNPLIYSLRNKDVKLAMKKSWKRITS

SEQ ID NO: 519 - protein, 313 aa, Artificial Sequence
  Synthetic
MMQMTMENKSSVSEFILMGLTDQPELQLPLFVLFLMNYTATVMGNLTLMNLICLNSNLHTPMYFFLFNLSFIDFCYSMVFTPKMLMSFILEKNTISFGGCMAQLFFFLFFVNSESYVLTAMAYDRYVAICKPLTYKVIMSPKICCLLIFSSYLMGFASAMAHTGCMIRLSFCDSNIINHYMCDIFPLLPLSCSSTYVNELMSSVVVGSAIILCCLIILISYAMILFNIIHMSSGKGWSKALGTCGSHIITVSLFYGSGLLAYVKPSSAKTVGQGKFFSVFYTLLVPMLNPLIYSLRNKDVKLAVKKTWKRITS

SEQ ID NO: 520 - protein, 314 aa, Artificial Sequence
  Synthetic
LNAQKTMENDSSVSEFILMGLTDQPELQLPLFVLFLVNYTVTVMGNLSLMNLICLNSNLHTPMYFFIFNLSFIDFCYSMVFTPKMLMGFVVEKNIISFRGCMTQLFFFLFFVNSESYVLTAMAYDRYVAICQPLLYKAVMSPGICFLLIFCTYLMGLVSALFHTGFMIRLNFCDSNVINHYMCDIFPLFRLSCSSTYLTELVSSAVVGTAIILCCLIILISYGMILYNIIHMSSGKGWSKALGTCGSHIITVSLFYVTGMLAYVKPSSAETVGQGKIFSVFYTFLVPMLNPLIYSLRNKDVKLAVKKTWKRLTC

SEQ ID NO: 521 - protein, 314 aa, Artificial Sequence; identical to SEQ ID NO: 520
  Synthetic

SEQ ID NO: 522 - protein, 308 aa, Artificial Sequence
  Synthetic
MENDSFVSEFILMGLTDHPELQLSLFVLFLMNYTAIVMGNLSLMILIFLNSNLHTPMYFFIFNLSFIDFCYSFVFTPKMLMSFFLEKNTISFRGCMTQLFFFCFFVNSESYVLTAMAYDRYVAICKPLLYKTIMVPRICCLLMFVSYLIGFTSAMILTGLMFRLNFCNNHIINHYMCDIFPVIQISCSDTYLNELVSTAVVGTGIILCSLLILMSYALILFNILNMSSGKGWSKAMGTCGSHIITVSLFYGSGLLAYVKPSSAETVGQGKFFSLFYTFLVPMLNPLIYSLQNKDVKVAVKKTLKRISN

SEQ ID NO: 523 - protein, 313 aa, Artificial Sequence
  Synthetic
MKQMATKNDSSVSEFILMGLTDQPELQLPLFFLFLLNHTVIVVGNLSLMSLIILNSNLHTPMYFFLFNLSFIDFCYSFVFTPKMLMSFVSEKNIIPFTGCMTQLFFFCFFAHSESWVLTVMAYDRYVAICKPLLYKAIMLPRICCLLMFVSYLIGFASAMVLAGLMIRLNFCNNNIINHYMCDIFPVLRISCSNTYLNELVSTAVVGTAIILCSLIIFISYAMILFNIVHMSSGKGWSKALGTCGSHIITVSFFYGSGLLAYVKPSSAETVGQGKFFSVFYTFLVPMLNPLIYSLRNKDVKVAVKKTIKRITS

SEQ ID NO: 524 - protein, 312 aa, Artificial Sequence
  Synthetic
MHMAMENDSSVTEFVFMGLTEQPELRLPLFFVFLLNYTATVMGNLSLMVLICLNSHLHNPMYFFLFNLSLVDFCYSFVCTPKMLMGFVSEKSIISYTGCMTQLFFFCFFVNSECYVLTAMAYDRYVAICKPLVYAILMSPRMCSLLMIGSYLMGFASAMAHTGCMIRLKFCDSNIINHYMCEIFPLLQLSCSSTYANELVSSLIACIVVIVSGLVILMSYASILLNVVQMSSATGWSKAMGTCGSHIITVSLFYGSGLLTYVKPASAESVDQGKFFSVFYTLMVPMLNPLIYSLRNKDVKLAAKRTMNRITI

SEQ ID NO: 525 - protein, 322 aa, Artificial Sequence
  Synthetic
HMKQMIMENDSSVSEFILMGLTYQPELWWPLFVLFLVNYTATVMGNLSLMTLICLNSHLHTPMYFFILNLSFIDFCYSFVFTPKMLMGFVSEHNTISFTGCMTQLFFFCLFVNSECYVLTAMAYDRYVAICRPLLYTVVMSPRACSLLMLAAHLMGVSSAVVHTGCIIQLRFCGSKVINHYMCDTFPLLELSCGSSHVNELVSSVSVAVVVVISSLIIVSSYALILVNVIHLSSSKGWSKAVSTCSSHIITVALFYGFGLLAHIKPSSAESVVQRKFFSVVYTFVLPLLNPLIYSLRNKDVKLALKRTLKTVTIQGKCLCCS

SEQ ID NO: 526 - protein, 316 aa, Artificial Sequence
  Synthetic
MATGNHYSVTEFILTGLTEQPELQMPLFFLFLVNCLITVVGNLSLMSLICCNSNLQTPMHFFLFNLSFIDLCYSFAFTPKTLMSFVLEKNIIYFTGCMTQLFFMCLFANSECYLVTAMDYDHYVAICQPLLYMIITSPMTCSLMMFGSYLMGGIGAIVHTGCMIRLNFCGSNIINHYMYDIFPLLQLSCSSIYANELVSSVFVSTVVLASSFLILTSYALILFNITQLSGKGLSKAMSTCSSHIMTVVLFYGFAMLTHVKTSSDESVNQGNFFCLFCTFLVPLLNPFIYSLKNKEVKLALKRTLRRLTVSESLGLP

SEQ ID NO: 527 - protein, 309 aa, Artificial Sequence
  Synthetic
MTLRNSSSVTEFILVGLSEQPELQLPLFLLFLGIYVFTVVGNLGLITLIGINPSLHTPMYFFLFNLSFIDLCYSCVFTPKMLNDFVSESIISYVGCMTQLFFFCFFVNSECYVLVSMAYDRYVAICNPLLYMVTMSPRVCFLLMFGSYVVGFAGAMAHTGSMLRLTFCDSNVIDHYLCDVLPLLQLSCTSTHVSELVFFIVVGVITMLSSISIVISYALILSNILCIPSAEGRSKAFSTWGSHIIAVALFFGSGTFTYLTTSFPGSMNHGRFASVFYTNVVPMLNPSIYSLRNKDDKLALGKTLKRVLF

SEQ ID NO: 528 - protein, 309 aa, Artificial Sequence [sequence omitted]

SEQ ID NO: 529 - protein, 313 aa, Artificial Sequence
  Synthetic
SQKRMAPRNSSSVTEFILVGFSNQPALQLPLFFVFLGIYVLTVIGNLGLITLIGLNSSLHTPMYFFLFNLSFIDFCYSCVFTPKMLSDFVSENIISYMGCMTQLFFFCFFVNSECYVLVSMAYDRYVAICNPLLYTVTMSPQVCTLLMFCSYVIGFAGAMAHTGSMLTLTFCDSNMIHHYLCEVLPLLQLSCTSTYANELVFFIVVGVVITASSISIFISYALILSNILKIPSAEGRSKAFGTCGSHVVAVALFFGSGAFTYLTTSFPGSMEEGRFASVFYTNVVPMLNPLIYSLRNKDVKLALNKTLKRVLF

SEQ ID NO: 530 - protein, 313 aa, Artificial Sequence; identical to SEQ ID NO: 529
  Synthetic

SEQ ID NO: 531 - protein, 313 aa, Artificial Sequence
  Synthetic
MLARNNSLVTEFILAGLTDHPEFQQPLFFLFLVVYIVTMVGNLGLIILFGLNSHLHTPMYYFLFNLSFIDLCYSSVFTPKMLMNFVSKKNIISYVGCMTQLFFFLFFVISECYMLTSMAYDRYVAICNPLLYKVTMSHQVCSMLTFAAYIMGLAGATAHTGCMLRLTFCSANIINHYLCDILPLLQLSCTSTYVNEVVVLIVVGINIMVPSCTILISYVFIVTSILHIKSTQGRSKAFSTCSSHVIALSLFFGSAAFMYIKYSSGSMEQGKVSSVFYTNVVPMLNPLIYSLRNKDVKVALRKALIKIQRRNIF

SEQ ID NO: 532 - protein, 314 aa, Artificial Sequence
  Synthetic
MLARNNSLVTEFILAGLTDHPEFRQPLFFLFLVIYIVTMVGNLGLITLFGLNSHLHTPMYYFLFNLSFIDLCYSSVFTPKMLMNFVSKKNIISNVGCMTRLFFFLFFVISECYMLTSMAYDRYVAICNPLLYKVTMSHQVCSMLTFAAYIMGLAGATAHTGCMLRLTFCSANIINHYLCDILPLLQLSCTSTYVNEVVVLIVVGTNITVPSCTILISYVFIVTSILHIKSTQGRSKAFSTCSSHVIALSLFFGSAAFMYIKYSSGSMEQGKVSSVFYTNVVPMLNPLIYSLRNKDVKVALRKALIKIQRRNIFL

SEQ ID NO: 533 - protein, 313 aa, Artificial Sequence
  Synthetic
MLARNNSLVTEFILAGLTDHPEFRQPLFFLFLVIYIVTMVGNLGLITLFGLNSHLHTPMYYFLFNLSFIDLCYSSVFTPKMLMNFVSKKNIISNVGCMTRLFFFLFFVISECYMLTSMAYDRYVAICNPLLYKVTMSHQVCSMLTFAAYIMGLAGATAHTGCMLRLTFCSANIINHYLCDILPLLQLSCTSTYVNEVVVLIVVGTNITVPSCTILISYVFIVTSILHIKSTQGRSKAFSTCSSHVIALSLFFGSAAFMYIKYSSGSMEQGKVSSVFYTNVVPMLNPLIYSLRNKDVKVALRKALIKIQRRNIF

SEQ ID NO: 534 - protein, 317 aa, Artificial Sequence
  Synthetic
MISMLAGNGSSVTEFVLAGLTDRPELQLPLFYLFLIIYIITVVGNLGLIILIGLNPHLHTPMYYFLFNLSFIDLCYSSVFSPKMLINFVSEKNSISYAGCMTQLFLFLFFVISECYMLTSMAYDRYVAICNPLLYKVTMSPQICSVISFAAYGMGFAGSSAHTGCMLRLTFCNVNVINHYLCDILPLLQLSCTSTYVNEVVVLIVVGINITVPSFTILISYVFILANILNIKSTQGRAKAFSTCSSHIMAISLFFGSAAFMYLKYSSGSMEQGKISSVFYTNVGPMLNPLIYSLRNKDVKVALRKSLIKFREKTDFN

SEQ ID NO: 535 - protein, 316 aa, Artificial Sequence
  Synthetic
SIISMLTGNGSFVTEFVLAGLTDRPELQLPLFYLFLIIYTVTVVGNLGLIILIGLNPHLYTPMYYFLFNLSFIDLCYSSVSSPKMLMNFVFEKNSISYEGCMTQLFFFLFFVISECYMLTSMAYDRYVAICNPLLYKVTMSPQVCSMLSFASYGMAFAGASAHTGCMLRLIFCNANVINFYLCDILPLLQLSCTSTYVNEVVVLIVVGINITVPSFTILISYVFILANILNIKSTQGRSKAFSTCSSHIMAISLFFGSGAFMYLNHSGSMNQGKISSVFYTNVVPMFNPLIYSLRNKDVKIALKKVMMRVHSRFIS

SEQ ID NO: 536 - protein, 315 aa, Artificial Sequence
  Synthetic
IYRRMTHGNYSLVTEFILEGLTNRPELQMPLFFLFLGIYVVTIVANLGLITLISLNTHLHTPMYYFLFNLSFVDICYSSVFTPKMLINFVVEKNTISYTGCLTQLYFFCFFVITECYLLTAMAYDRYVAICKPLLYNVILSPRICAVFVFGAYVMGCWGSLAHTLCMARLTFCDANLVNHYLCDILPVLQLSCTSTYNNEVVVFVLVGMNIVVSTSTTFISYGFIIANILRISSTQGRAKAFNTCSSHIMTVSLFFGAAAFMYMQPSDVESMDKGKVASVFYTNVGPMLNPLIYSLRNKDVKVALKKTLKRKLFS

SEQ ID NO: 537 - protein, 311 aa, Artificial Sequence
  Synthetic
MAAANTSSVAEFILVGLTDQPQLQIPLFFLFLGFYIVTMVGNLGLITLIGLNSHLHIPMYFFLFNLSFIDFSYSTTLTPKMLVGFVLRKNIISYAGCMTQFFFFCFFVFSESYILSAMAYDRYVAICKPLLYSVTMSPQVCSYLLSGVYGMGVFGAVAHMGNLQFISFCADNIINHYMCDIIPLLELSCNSSYINLLVVFIVVTIGIGVPIVTIFISYGFILSSILHISSKEGRSKAFSTCTSHIIVVSLFFGSGAFMYLKPPSSLPLDQGKVSSVFYTAVVPMFNPLIYSLRNKDVKIALKKTLSRKNFS

SEQ ID NO: 538 - protein, 310 aa, Artificial Sequence
  Synthetic
MTAKNSSVIEFILAGLTDQPGLRMPLFFLFLGFYMVTVVGNLGLISLIGLNSHLHTPMYFFLFNLSVIDFCYSSTIIPKMLMNFISRKNIISHSGCMTQLFFFCFFVVSESFILSAMAYDRYVAICNPLMYTVTMSPQVYLLLLLGVYVMGFSGAMAHTGNLMNLTFCADNLINHFMCDILPLLELSCNSTFINELVIFIVVAFDIGVPIVTIFISYALILSSILRMHSTEGRSKAFSTCSSHLIVVCLFFGSGAFMYLKPPSILPLDQGKVSSLFYMIVVPMLNPLIYSLRNKDVKVALRKTLGKRILS

SEQ ID NO: 539 - protein, 310 aa, Artificial Sequence
  Synthetic
MTAKNSSVTEFILAGLTNQPGLRMPLFFLFLGFYMVTVVGNLGLISLIGLNSHLHTPMYFFIFNLSVIDFCYSSTIIPKMLTSFISKTNIISHSGCMTQLFFFCFFVFSESFILSAMAYDRYVAICNPLMYTVTMSPQVCLLLLLGVYVMGFSGGIAHTGNLMNLTFCADNLINHFMCDILPLLELSCSNTFTNELVVFIVVAFGIGVPIVTIFISYALILSSILHMHSTEGRSKAFSTCSSHLIVVCLFFGSGAFMYLKPPSILPLDQGKVSSLFYTIVVPMLNPLIYSLRNKDVKVALRKTLGKRILS

SEQ ID NO: 540 - protein, 310 aa, Artificial Sequence
  Synthetic
MTAKNSSVTEFILAGLTDQPGLRMPLFFLFLGFYMVTVVGNLGLISLIGLNSHLHTPMYFFLFNLSLIDFCYSSTISPKMLMSFISKKNIISHPGCMAQLFFFCFFVISESFILSAMAYDRYVAICNPLMYMVTMSPQVCLLLLFGVYLMGFVGAMAHTISMARLTFCADNIVNHYMCDILPLLEHSCTSTYVNELVVFIFVSFDIGVPIVTIFISYALILSSILHMHSTEGRSKAFSTCSSHMIVVCLFFGSGAFMYLQPPSVLSLDQGKVSSLFYTIVVPMLNPLIYSLRNKDVKVAVRKTLDRRIFS

SEQ ID NO: 541 - protein, 310 aa, Artificial Sequence
  Synthetic
MTAKNSSVTEFILAGLTDQPGLRMPLFFLFLGFYMVTVVGNLGLISLIGLNSHLHTPMYFFLFNLSLIDFCYSSTISPKMLMSFISKKNIISHPGCMAQLFFFCFFVISESFILSAMAYDRYVAICNPLMYMVTMSPQVCLLLLFGVYLMGFVGAMAHTISMARLTFCADNIVNHYMCDILPLLEHSCTSTYVNELVVFIFVSFDIGVPIVTIFISYALILSSILHMHSTEGRSKAFSTCSSHMIVVCLFFGSGAFMYLQPPSVLSLDQGKVSSLFYTIVVPMLNPLIYSLRNKDVKVTVRKTLDRRIFS

SEQ ID NO: 542 - protein, 310 aa, Artificial Sequence
  Synthetic
MAAKNSSVTEFILEGLTHQPGLRIPLFFLFLGFYTVTVVGNLGLITLIGLNSHLHTPMYFFLFNLSLIDFCFSTTITPKMLMSFVSRKNIISFTGCMTQLFFFCFFVVSESFILSAMAYDRYVAICNPLLYTVTMSCQVCLLLLLGAYGMGFAGAMAHTGSIMNLTFCADNLVNHFMCDILPLLELSCNSSYMNELVVFIVVAVDVGMPIVTVFISYALILSSILHNSSTEGRSKAFSTCSSHIIVVSLFFGSGAFMYLKPLSILPLEQGKVSSLFYTIIVPVLNPLIYSLRNKDVKVALRRTLGRKIFS

SEQ ID NO: 543 - protein, 310 aa, Artificial Sequence; identical to SEQ ID NO: 542
  Synthetic

SEQ ID NO: 544 - protein, 311 aa, Artificial Sequence
  Synthetic
MAAENSSFVTQFILAGLTDQPGVQIPLFFLFLGFYVVTVVGNLGLITLIRLNSHLHTPMYFFLYNLSFIDFCYSSVITPKMLMSFVLKKNSISYAGCMTQLFFFLFFVVSESFILSAMAYDRYVAICNPLLYMVTMSPQVCFLLLLGVYGMGFAGAMAHTACMMGVTFCANNLVNHYMCDILPLLECACTSTYVNELVVFVVVGIDIGVPTVTIFISYALILSSIFHIDSTEGRSKAFSTCSSHIIAVSLFFGSGAFMYLKPFSLLAMNQGKVSSLFYTTVVPMLNPLIYSLRNKDVKVALKKILNKNAFS

SEQ ID NO: 545 - protein, 313 aa, Artificial Sequence
  Synthetic
MTMAAENSSFVTQFILAGLTDQPGVQIPLFFLFLGFYVVTVVGNLGLITLIRLNSHLHTPMYFFLYNLSFIDFCYSSVITPKMLMSFVLKKNSISYAGCMTQLFFFLFFVVSESFILSAMAYDRYVAICNPLLYMVTMSPQVCFLLLLGVYGMGFAGAMAHTACMMGVTFCANNLVNHYMCDILPLLECACTSTYVNELVVFVVVGIDIGVPTVTIFISYALILSSIFHIDSTEGRSKAFSTCSSHIIAVSLFFGSGAFMYLKPFSLLAMNQGKVSSLFYTTVVPMLNPLIYSLRNKDVKVALKKILNKNAFS

SEQ ID NO: 546 - protein, 310 aa, Artificial Sequence
  Synthetic
MATENASVPEFILAGLTDQPGLRMPLFFLFLGFYMVTMVGNLGLITLIGLNSHLHTPMYFFLFNLSLIDFCYSTVITPKMLVSFVSKKNIISYSGCMTQLFFFLFFVVSESFILSAMAYDRYVAICNPLMYTVTMSPQVCLLLLLGVYVMGFAGAMAHTAFMVKLTFCADKLVNHYMCDILPLLERSCTSTYVNELVVFIVVGIDIGVPTVTIFISYALILSSILRISSTEGRSKAFSTCSSHIIAVSLFFGSGAFMYLKPSSLLPMNQGKVSSLFYTIVVPMLNPLIYSLRNKDVKVALRKTLSRSSFS

SEQ ID NO: 547 - protein, 311 aa, Artificial Sequence
  Synthetic
MDTKNISFITEFILVGLTEYTETHFPFFFLFLGIYAITVAGNLGLLTLIGMNSPLHTPMYYFLFNLSFIDLCYSTVITPKLLVNFVSERNTISYEGCMTQLYFYCFFVSAECYVLTVMAYDRYVAICKPLLYTVTMSPQVCSLLTLIVYVGAFIGAWAHTGCMMRLTFCKDNTVNHYMCDILPLLELSCSSTYINELVVFIVVGFDVGVPSITIVVSYTFILSSILHIRSTEGRSKAFSTCSSHIIVVSVFFGSGAFMYLHPSSVLSMDQGKVSTVFYTIVVPMLNPLIYSFRNKEVKIALRKTLRMKISS

SEQ ID NO: 548 - protein, 310 aa, Artificial Sequence
  Synthetic
MDSVNISLVTEFILVGLTDKPYLQIPLFFIFLAMYLVTALGNLSLIILTVLNSHLHTPMYFFLFNLSFVDFCYSSVFTPQMLMNFITRKNTISYMECMSQLYFFCFFVISECYVLTSMAYDRYVAICKPLLYNLVMSSKLCLNLMLVSYFIAFSESVAHTVCIMRLNFCDANKINHYFCDIPPLLQLSCTTTYINKLVVFVASSINIIVPISTIFISYGFILSSIFHIHSSEGRSKAFSTCSSHIIAAFLFFGSGAFMYFQPSSAESMDEGKISSVFYTNVIPMMNPLLYSLRNKDIKVALRKTLSKRNI

SEQ ID NO: 549 - protein, 310 aa, Artificial Sequence; identical to SEQ ID NO: 548
  Synthetic

SEQ ID NO: 550 - protein, 309 aa, Artificial Sequence
  Synthetic
MDSVNVSLVAEFILVGLTDKPYLQIPLFFVFLAMYLVTALGNLSLIILTVLNSYLHTPMYFFLFNLSFVDLCYSSVFTPQMLMNFIRKNTTSYMECMAQLYFSCFFVISECYVLTSMAYDRYVAICKPLLYNLVMSSKLCLNLMLVSYFIAFSESVAHTACMLRLTFCDANTINYYFCDIPPLLQLSCTTTRVNEVVIFVVGSINIIIPTSTIFVSYGFILSSIFRISSSEGRSKAFSTCSSHIIAAFLFFGSGAIRYFKPSSDGSMDEGKISSVFYTNVIPMINPLLYSLRNKDIKVALRRTLRKRNF

SEQ ID NO: 551 - protein, 310 aa, Artificial Sequence
  Synthetic
MGFENGSSVTEFILVGLTKESDLQCPLFILFLMMYVVTVLGNQGLISLIGLNSHLHTPMYFFLFNLSFVDLWYSSVFTPKMLESFISEKNTISYRGCMAQLFFFCFFSISECYILTSMAYDRYVAICNPLLYNIVMSPKLCLILMFSSYMMAFSGAMAHTGCMLRLTFCDANTINHYFCDILPVMQLSCTSTYVNELEVFVVVGINIIVPTITIFISYGFIISSIFRISSKEGRSKAFSTCSSHIIAVSLFFGSGAFMYLKPSSAESMNEGKISSIFYTNTVPLLNPLIYSLRNKDVKDALIKTLSKRKR

SEQ ID NO: 552 - protein, 310 aa, Artificial Sequence
  Synthetic
MGFENGSSVTEFILVGLTKESDLQCPLFILFLMMYVVTVLGNQGLISLIGLNSHLHTPMYFFLFNLSFVDLWYSSVFTPKMLESFISEKNTISYRGCMAQLFFFCFFSISECYILTSMAYDRYVAICNPLLYNIVMSPKQCLILMFSSYMMAFSGAMAHTGCMLRLTFCDANTINHYFCDILPLLQLSCTSTYVNELEVFVVVGINIIVPTITIFISYGFIIASIFRISSKEDRSKAFSTCSSHIIAVSLFFGSGAFMYLKPSSAESMNEGKISSIFYTNTVPLLNPLIYSLRNKDVKDALIKTLSKRKR

SEQ ID NO: 553 - protein, 311 aa, Artificial Sequence
  Synthetic
MAFGNRSFVTEFILIGLTDQPNLQLPLFFLFLVMYIVTMTGNLGLVILIGLNSHLHTPMYFFLFNLSLIDLCYSSVFTPKMLLNFILNKNIISYTGCMTQLYFYSFFVISECYVLMSMAYDRYVAICNPLLYNIAMTPKICSYLMLGSYLMAFSGAMAHTGCMLRLTFCDANTINHYFCDILPVMQLSCTSTYVNELEVFIVVGINILVPSITIFISYGFILSSIFHINSNEGRSKAFSTCSSHIIAVSLFFGSGAFMYLKPSSVGSMDEGKISSVFYTNVVPMMNPLIYSLRNKDVKVALRITLSRWKLW

SEQ ID NO: 554 - protein, 310 aa, Artificial Sequence
  Synthetic
MASANVSLVTEFILVGLTNQPDLQIPLFFVFLIMYIVTALGNLCLIILIVLNSHLHTPMYFFLFNLSFIDLCYSTVFTPKMLMNFILSKNAISYMGCLTQLYFFCFFVISECYVLTSMAYDRYVAICNPLLYTVAMSPKLCLNLMLGTYAMAFSGAMAHTGCMLRLTFCDANTINHYFCDILPVMQLSCTSTYVNELVVFIVVGINIIVPSITIFISYGFILSSIFHIKSNEGRSKAFSTCSSHIIAVCLFFGSGAFMYLKPSSSSSMDQGKTSSVFYTNVVPMMNPLIYSLRNKDVKIALRKTLSRWKF

SEQ ID NO: 555 - protein, 309 aa, Artificial Sequence
  Synthetic
MDSVNVSLVTEFLLVGLTHQPDLQIPLFLLFLAMYLVTALGNLGLIILVLLNSHLHTPMYFFLFNLSFIDFCYSSVFAPKMLMNFILRQNAISYMQCMTQLYFFFFFVVSECFVLTSMAYDRYVAICNPFLYNVMISPQVCLNLMIGSYLMAFSEAVVLTVCMLTLTFCDGNINHYFCDILALFQLSCSSTYVNKLVAYVIVVINILFSTPAIFISYGFILSSIFRISSSKGRSKAFSTCSSHIIAVSLFFGSRAFVYFKPSSPGSMEWAKISSVFYTNVVPMMNPLIYSLKNKDVKIALRKSLARWKI

SEQ ID NO: 556 - protein, 309 aa, Artificial Sequence
  Synthetic
MDSVNVSLVTEFLLVGLTHQPDRQIPLFLLFLAMYLVTALGNLGLIILVLLNSHLHTPMYFFLFNLSFIDFCYSSVFTPKMLMNFILRQNAISYMQCMTQLYFFCFFVVSECFVLTSMAYDRYVAICNPLLYNVMISPQVCLNLMIGSYLMAFSEAVALTVCMLTLTFCDGNINHYFCDILALFQLSCSSTYVNKLVAYVIVVINILFSTPTIFISYGFILSSIFRISSSKGRSKAFSTCSSHIIAVSLFFGSGAFVYFKPSSPGSMEWAKISSVFYTNVVPMMNPLIYSLKNKDVKIALRKSLARWKI

SEQ ID NO: 557 - protein, 310 aa, Artificial Sequence
  Synthetic
MVLTNHSLVTEFILLGLTDNPDLQIPLFLVFLVMYMITAFGNLTLIFLTVLNSHLHTPMYFFLFNLSFIDLCYSSVVTPKLLMNFVLKKNIIGFAGCMTQLYFFCFFVISECYVLTAMAYDRYVAICNPLMYNVTMSPKVCSYLMLGSYLMGFSDAMIHTGCILRLTFCDGNTINHYFCDLLPLMQLSCTSTYINEVEIFIVGGKDITVPSIVVFISYGFILSNILQIKSTRGRYKAFNTCSSHIIAVSLFYGSCAFMYLKPSSVGSLNEGKVSSVFYTIVVPMMNPLIYSLRNKDVKLALRKTLSRKKF

SEQ ID NO: 558 - protein, 313 aa, Artificial Sequence
  Synthetic
MALVNGSTVTEFILLGLTDQPGLQMPLFLLFLLMYMITVFGNLTLIFLILLNSHLHTPMYFFLLNLSFVDLCYSSVITPKMLMNFILKKNLISYMGCMSQLYFFCFFIISECYVLVSMAYDRYVAICNPLLYNTAMSPRVCSYLMLGTYLMGFFDAMIHTGCMLRLSFCDGNIINHYFCDVLPLLQLSCTSTYVNETEIFIVGGKDIILPSAIIFFSYGFILSNIFQIRSTLGRSKAFSTCSSHIIAVSLFFGSCGFMYLKPSSAVSIDQGKISSIFYTIVVPMMNPLIYSLRNKDVKVALRKTLSRRKFLKV

SEQ ID NO: 559 - protein, 316 aa, Artificial Sequence
  Synthetic
MALANGSFVTEFILLGLTDQPDLQMPLFLIFLIIYLITAFGNLTLIILIVLNSHLHTPMYFFLFNLSFIDLCYSSLITPKMLMNFVLEKNIISYMGCMTQFYFFGFFAISECYVLTAMAYDRYVAICNPLLYSVAMSPKMCSYFILGSYFMGFSGAMIHTGCVMRLTFCDGNTINHYFCDLLPLLQLSCTSTYVNEIELFIVTGKDIIVPTVIIFASYGFILSNILKIRSTSGRSKAFSTCSSHIIAVSMFFGSSAFMYLKPSSAVSMNEAKFSSIFYSIVVPMMNPLIYSLRNKDVKVGLKKTLSRMFSHNLISL

SEQ ID NO: 560 - protein, 310 aa, Artificial Sequence
  Synthetic
MALINGSVVTEFILLGLTDQPDLQVPLFLVFLLMYMITALGNLTLIILIVLNSHLHTPMYFFLFNLSFVDFCYSSVIIPKMLMNFILKKNFISYVGCMTQFYLFGFCVILECYILTSMAYDRYVAICNPLLYNIVMSPKMCSYLMLGSYLMGFSGAMIHTGCVLRLSFCDGNIINHYFCDLLPLLQLSCTSTYVNEIEVLIVAGKDIIVPTVIIFISYGFILSSIFQMKSTKGMSKAFSTCSSHIIAVSLFFGSGAFMYLKPNSTGTMNNGKIPSIIYTILIPMMNPLIYSLRNKDVKVALRKTLRKKIL

SEQ ID NO: 561 - protein, 312 aa, Artificial Sequence
  Synthetic
MTFENASMVIEFILLGITDQPDLKIPFFLLFFVGYMITVLGNLTLIILIGLNSHLHTPMYFLLFNLSFIDLCYSSVITPKMLMSFIQKKNIISYTGCMIQLYFFCFFVISECYVLTSMAYDRYVAICNPLLYNVTLSSKVCCYLMLGSYFMGFSGAMIHTGCILRLTFCDGNTINHYFCDLLPLLQISCTSTYINEIELFIVAGKDIIVPTIIIFISYGFILFSVLKIKSTESRSKAFSTCSSHMLAVSLFFGSGAFMYLKPTSALSINKGKFSSLFYTIVVPMMNPLIYSLRNKDVKAALRKTLNRRIFSS

SEQ ID NO: 562 - protein, 310 aa, Artificial Sequence
  Synthetic
MALENASLVTEFILMGLTNRPDLQIPLFLLFLVMYVIATLGNLALIMLIILNSHLHTPMYFFLLNLSCIDLFYCSVITPKMLMNFVLKKNVISYEGCMAQFYFFAFFAISECYVLTTMAYDRYVAICNPLLYNIVMSPKLCSYLMMGTYLMGFSGAMIHTGCILRLTFCDKNTINHYFCDILPLLQISCTSTYVNEIELFIVAGKDIIVPTVIIFTSYGFILSSILKISSTAGMSKAFSTCSSHIIALCLFFGSCTFMYLKPSSVESMDQGKISSVFYNIVVPLMNPLIYSLRNKDVKIAIKKTITKGKF

SEQ ID NO: 563 - protein, 311 aa, Artificial Sequence
  Synthetic
MGLENGSLVTEFILLGLTNDPDLQLPLFLLFLLIYTTTAVGNLALITLIALNSHLHTPMYFFLLNLSCIDLCYSSVITPKMLMNFLVRKNIISYMGCMTQLYFFCFFAICECCVLTSMAYDRYVAICNPLLYNITMSPKVCSYLMLGSYIMGFSGAMIHTGCILRLTFCDRNIINHYFCDLFPLLQLSCTSTYANEIEILIVGGKDIIVPSVIIFTSYGFILSNILQMRSTAGMSKAFSTCSSHILAVSLFFGSCAFMYLQPSSPGSMDQGKVSSVFYTIVVPMMNPLIYSFRNKDVKIALRKIFGQRRFS

SEQ ID NO: 564 - protein, 311 aa, Artificial Sequence
  Synthetic
MGLENGSLVTEFILLGLTNDPDLQLPLFLLFLLIYTTTAVGNLALITLIALNSHLHTPMYFFLLNLSCIDLCYSSVITPKMLMNFLVRKNIISYMGCMTQLYFFCFFAICECCVLTSMAYDRYVAICNPLLYNITMSPKVCSYLMLGSYIMGFSGAMIHTGCILRLTFCDRNIINHYFCDLFPLLQLSCTSTYANEIEILIVGGKDIIVPSVIIFTSYGFILSNILQMRSTAGMSKAFSTCSSHILAVSLFFGSCAFMYLQPSSPGSMDQGKVSSVFYTIVVPMMNPLIYSFRNKDVKIALRKIFGKRRFS

SEQ ID NO: 565 - protein, 309 aa, Artificial Sequence
  Synthetic
MAVGNSSSVKEFILLGLTQEPELQLPLFFLFLGIYVVSVMGNLGLIVLIVLNPPLHTPMYYFLFNLSFTDLCYSTVITPRMLVGFVKQNTISHAECMTQLFFFCFFVIDECYILTAMAYDRYAAICKPLLYQVTMSHQVCLLMTVGMYVMGLVGAIAHIVCMLRLTFCEGHIINHYMCDIPPLLKLSCTSTYINELVVFIVVGVNVIVPTLTIFITYTLILSNILSIHSAEGRSKAFSTCGSHVIAVSLFFGAAAFMYLKPSSASVDEEKLSTIFYTIVGPMLNPFIYSIRNKDVHIALRKTLKKSMFT

SEQ ID NO: 566 - protein, 313 aa, Artificial Sequence
  Synthetic
TLERMAFSNDSSVKEFILLGLTQQPELQMPLFFLFLGIYVVSMVGNLGLIVLIVLNPHLHTPMYYFLFNLSFIDFCYSSVITPKMLVGFVKQNIISHAECMTQLFFFSFFVIDECYILTAMAYDRYAAICKPLLYQVTMSYQVCLLMTGGMYVMGLVGAIAHIVCMLRLTFCEGYIINHYMCDIPPLLKLSCTSTYINELVVFIVVGVNVIVPTLTIFISYTLILSNILSIHSAEGRSKAFRTCGSHFIAVSLFYGASAFMYLKPSSASVDDDKISTIFYTIVGPMLNPFIYSLRNKDVHIALRKTLKKSTFI

SEQ ID NO: 567 - protein, 313 aa, Artificial Sequence
  Synthetic
MLGRMAFSNDSSVKEFILLGLTQQPELQMPLFFLFLGIYVVSMVGNLGLIVLIVLNPHLHTPMYYFLFNLSFIDLCYSSVITPRMLVGFVKQNIISHAECMTQLFFFCFFVIDECYILTAMAYDRYAAICKPLLYQVTMSHQVCHLMMVGVYVMGLVGAMAHTGSMLSLTFCDGNIINHYMCDIPPLQKLSCTSTSINELVVFIVVGVNVIIPSLTVFISYTLILSNILSIQSAEGRSKAFSTCGSHVIAVSLFFGASAFMYLKPSSASVDDDKISTIFYTIVGPMLNPFIYSLRNKDVHIALRKTLKKSMFI

SEQ ID NO: 568 - protein, 309 aa, Artificial Sequence
  Synthetic
MGFGNDSSVKEFILLGLTQQPELQLPLFFLFLGIYVVSIVGNLGLIVLIVLNPHLHTPMYYFLFNLSFVDFCYSSVITPKMLVSFVTQNIISHAECMTQLFFFAFFVIDECYILTAMAYDRYAAICKPLLYQVTMSHQVCHFMMMGVVVMGSVGAVAHIICMLRLTFCDGNIINHYMCDIPPLLKLSCTSTYINELVVFIIVGFNVTVPILTIFISYTLILSNILSIHSAEGRSKAFSTCGSHVIAVSIFFGSLAFMYLKPSSASVDDDKISTIFYTIVGPMLNPFIYSLRNKDVHIAMRKTLKKGMFA

SEQ ID NO: 569 - protein, 309 aa, Artificial Sequence
  Synthetic
MALANVSSVKEFILLGLTQQPELQLPLFFLFLGIYVVSVMGNLGLIVLIVLNPHLHTPMYYFLFNLSFTDLCYSSAITPRMLVGFVKQNIISHAECLTQLFFFAFFVIDECYILTAMAYDRYAAICKPLLYQVTMSHQVCLLMTMGVYVMGFAGALSHIVCMLRLTFCDGNIINNYVCDVHPLLKLSCSSTSINELVLFIVVGVNITVPSLTLFVSYTLILSNILSIHSGEGRSKAFSTCGSHVIAVSFFFGAAAFMYLKPSSASVDEDKVSTIFYTILGPMLNPFIYSIRNKDVHIALKKTLKKKILT

SEQ ID NO: 570 - protein, 309 aa, Artificial Sequence
  Synthetic
MALRNASSVKEFILLGLTQQPGLQLPLFFLFLGIYVVSMLGNLGLIVLIVLNPHLHTPMYYFLFNLSFIDLCYSSVITPRMLVGFVKQNIISHAECLTQLFFFAFFVIDECYILTAMAYDRYAAICKPLLYQVTMSHQVCLLMTMGVYVMGFAGALSHIVCMLRLTFCDGNIINHYVCDVLPLLKLSCTSTSINEMVVFIVVGVNVIVPSLTLFVSYTLILSNILSIHSAEGRSKAFSTCGSHVMAVSFFFGAAAFMYLKPSSASVDEEKLSTIFYTILGPMLNPFIYSIRNKDVHLALRKTLMKLRFS

SEQ ID NO: 571 - protein, 309 aa, Artificial Sequence
  Synthetic
MVLENSSSVKEFILLGLTQQPELQMPLFFLFLGIYIVSMVGNLGLTVLIVLNPHLHNPMYYFLFNLSFTDLCYSTVITPRMLVGFVKQNTISHAECMTQHFFFCFFVIDECYILTAVAYDRYAAICKPLLYQVTMSHQVCLLMTVGVYVMGFLEAIAHTGSMVSLTFCDGNIINHYACDILPLLKLSCTSTTINELVVFIVVGVNVIVPTLTIFISYTLILSNILSIHSAEGRSKAFSTCGSHVIAVSLFFGAAAFMYLKPSSASEDDDKVSTIFYTIVGPMLNPFIYSLRNKDVYLALRKTLMKRSFT

SEQ ID NO: 572 - protein, 313 aa, Artificial Sequence
  Synthetic
NWGRMALGNDSSVKEFILLGLTQQPELQLPLFFFFLGVYIFSVVGNLGLIVLIVLNPHLQTPMYYFLFNLSFTDLCYSSVITPKMLVSFVKQNIISHAECMTQLFFFCFFVIDECYILTAMAYDRYAAICKPLLYQVTMSHRVCLLMTVGVYVMGFVEAMAHTASMVHLIFCDSNIINHYMCEINALLKLSCTSTSINELVVYIVVGFNVIVPTLTIFITYTLILFNILSIHSAEGRSKAFSTCGSHMIAVSLFFGAAAFMYLKPSSASEDEDKVSTIFYTIMGPMLNPFIYSIRNKDVHIALKKTLKRSIFI

SEQ ID NO: 573 - protein, 311 aa, Artificial Sequence
  Synthetic
MASGNDSTTVKEFILLGLTQQPELQLPFFFLFLGIYVVSIVGNLGLIVLIVLNPHLHTPMYYFLFNLSFIDFCYSSVITPKMLVGFVKQNIISHAECMTQLFFFAFFVIDECCILTAMSYDRYVAICKPLLYKVTMSYQVCFMMTVSVYMMGFVGAIAHTICMLRLTFCDGNIINHYMCDIPPLLKLSCTNTSVNELVVFIVVGVNVIGPTLIIFTSYTLIIFNISHIRSTEGRSKAISTCSSHIIAVSIFFGASAFMYLKPSPVGSVGEDKVSTVFYTIVGPMLNPFIYSLRNKDVHIALHKTLKKSMLI

SEQ ID NO: 574 - protein, 315 aa, Artificial Sequence
  Synthetic
MTPGMVSENNSSVKEFILLGLTQLPELQLPLFFLFLGIYVFSMVGNLGLIVLIVLNPPLHTPMYYFLFNLSFTDLCYSSVITPKMLVGFVKQNIISHAECMTQLFFFAFFVIDECCILTAMAYDRYAAICKPLLYKVIMSHQVCFVLMVGGYTVGFVGATAHTVCMLRLTFCDGNIINHYMCDIPPLLKLSCTSTSINELVVFIVVGVSIIVPSLTVFISYTLILSNILRIHSAKGRSKALSTCSSHMIAVSLFFGSSSFIYFKSSPVGSVDKDKISTVFYTVVVPMMNPFIYSLRNKDVQIALRKTLKKNCSLK

SEQ ID NO: 575 - protein, 314 aa, Artificial Sequence
  Synthetic
MGVKNHSTVTEFLLSGLTEQAELQLPLFCLFLGIYTVTVVGNLSMISIIRLNRQLHTPMYYFLSSLSFLDFCYSSVITPKMLSGFLCRDRSISYSGCMIQLFFFCVCVISECYMLAAMACDRYVAICSPLLYRVIMSPRVCSLLVAAVFSVGFTDAVIHGGCILRLSFCGSNIIKHYFCDIVPLIKLSCSSTYIDELLIFVIGGFNMVATSLTIIISYAFILTSILRIHSKKGRCKAFSTCSSHLTAVLMFYGSLMSMYLKPASSSSLTQEKVSSVFYTTVILMLNPLIYSLRNNEVRNALMKLLRRKISLSPG

SEQ ID NO: 576 - protein, 314 aa, Artificial Sequence
  Synthetic
MGVKNHSTVTEFLLSGLTEQAELQLPLFCLFLGIYTVTVVGNLSMISIIRLNRQLHTPMYYFLSSLSFLDFCYSSVITPKMLSGFLCRDRSISYSGCMIQLFFFCVCVISECYMLAAMAYDRYVAICSPLLYKVIMSPRVCSLLVAAVFSVGFTDAVIHGGCILRLSFCGSNIIKHYFCDIVPLIKLSCSSTYIDELLILVIGGFNMVATSLTIIISYAFILTSILRIHSKKGRCKAFSTCSSHLTAVLMFYGSLMSMYLKPASSSSLTQEKVSSVFYTTVIPMLNPLIYSLRNNEVKNALMKLLRRKISLSPG

SEQ ID NO: 577 - protein, 311 aa, Artificial Sequence
  Synthetic
MSIRNHSTVTEFLLLGLTEEPALQLPLFCLFLGIYIVTMVGNLGMIAVIKLNSQLHTPMYYFLSSLSFLDFCYSSVVTPKMLVGFLSRDKAISYSDCMAQLFFFCIFVISECYMLAAMAYDRYVAICSPLLYAVIMSPRVCSLLVAAVFSVGFTDAVIHGGCILRLSFCKSNIIKHYFCDIVPLIQLSCSSTYIDELLIFVIGGFNMIATSLTIVISYGFILSSILRIHSKEGRSKAFSTCSSHLTAVLIFYGSLMSMYLKPASNGSVIHEKVTSVFYTTVIPMLNPLIYSLRNKEVKHALVKLVRRKISS

SEQ ID NO: 578 - protein, 309 aa, Artificial Sequence
  Synthetic
MTAENQSTVTEFILGGLTNRPELQLPLFLLFLGILVVTMVGNLGMITLIGLNSQLHTPMYFFLSNLSLVDLCYSSVITPKMLINFVAQRNLISYVGCMSQLYFFLVFVIAECYMLTVMAYDRYVAICQPLLYNIIMSPALCSLLVAFVYAVGLIGSAIETSLMLKLNYCEDLISHYFCDILPLMKLSCSSTYDIEMAVFFLAGFNIIVTSLTVLISYAFILSSILRISSNEGRSKAFSTCSSHFAAVGLFYGSTAFMYLKPSTASSLARENVASVFYTTVIPMLNPLIYSLRNKEVKTALDKTLRRKVF

SEQ ID NO: 579 - protein, 309 aa, Artificial Sequence
  Synthetic
MAAGNHSTVTEFILKGLTKRADLQLPLFLLFLGIYLVTIVGNLGMITLICLNSQLHTPMYYFLSNLSLMDLCYSSVITPKMLVNFVSEKNIISYAGCMSQLYFFLVFVIAECYMLTVMAYDRYVAICHPLLYNIIMSHHTCLLLVAVVYAIGLIGSTIETGLMLKLPYCEHLISHYFCDILPLMKLSCSSTYDVEMTVFFSAGFNIIVTSLTVLVSYTFILSSILGISTTEGRSKAFSTCSSHLAAVGMFYGSTAFMYLKPSTISSLTQENVASVFYTTVIPMLNPLIYSLRNKEVKAAVQKTLRGKLF

SEQ ID NO: 580 - protein, 313 aa, Artificial Sequence
  Synthetic
TQRRMAAGNHSTVTEFILKGLTKRADLQLPLFLLFLGIYLVTIVGNLGMITLICLNSQLHTPMYYFLSNLSLMDLCYSSVITPKMLVNFVSEKNIISYAGCMSQLYFFLVFVIAECYMLRVMAYDRYVAICHPLLYNIIMSHHTCLLLVAVVYAIGLIGSTIETGLMLKLPYCEHLISHYFCDILPLMKLSCSSTYDVEMTVFFLAGFNIIVTSLTVLVSYTFILSSILGISTTEGRSKAFSTCSSHLAAVGMFYGSTAFMYLKPSTISSLTQENVASVFYTTVIPMLNPLIYSLRNKEVKAAVQKTLRGKLF

SEQ ID NO: 581 - protein, 311 aa, Artificial Sequence
  Synthetic
MATSNHSSGAEFILAGLTQRPELQLPLFLLFLGIYVVTVVGNLGMIFLIALSSQLYPPVYYFLSHLSFIDLCYSSVITPKMLVNFVPEENIISFLECITQLYFFLIFVIAEGYLLTAMEYDRYVAICRPLLYNIVMSHRVCSIMMAVVYSLGFLWATVHTTRMSVLSFCRSHTVSHYFCDILPLLTLSCSSTHINEILLFIIGGVNTLATTLAVLISYAFIFSSILGIHSTEGQSKAFGTCSSHLLAVGIFFGSITFMYFKPPSSTTMEKEKVSSVFYITIIPMLNPLIYSLRNKDVKNALKKMTRGRQSS

SEQ ID NO: 582 - protein, 311 aa, Artificial Sequence; identical to SEQ ID NO: 581
  Synthetic

SEQ ID NO: 583 - protein, 307 aa, Artificial Sequence
  Synthetic
NHSSVTDFILEGLTKRPELQLPLFLLFLGIHVITVVGNLGMILLINISSQLHSPMYYFLSHLSFIDLCYSSVITPKMLVNFVCAKNTISFKECMTQLYFFLLLAISEGYLLTAMAYDRYVAICSPLLYNTVMSHKVCSIMMAVVYSLGFFGATVHTTRMTMLSFCGSHIIRHYFCDILPLLTLSCSSTHINEVLLFIIGGVNTLAPTLAVIISYAFILTSILRIRSNEGRSKAFGTCSSHIMAVGIFFGSITFMYFKPPSSNNMEQEKVSSVFYTTVIPMLNPLIYSLRNKDVKTALKKMVGRRQLS

SEQ ID NO: 584 - protein, 307 aa, Artificial Sequence
  Synthetic
NHSSVIDFILEGLTKRPELQLPLFLLFLAIYVITVVGNLGMILLITISSQLHSPMYYFLSHLSFIDLCYSSVITPKMLVNFVCEKNTISFLECMTQLYFFLIFVIAEGYLLTAMAYDRYVAICSPLLYNIVMSHKVCSIMMAVVYSLGFFGATVHTTRMTMLSFCGSHIVSHYFCDILPLLTLSCSSTHINEVLLFIIGGVNTLAPTLAVIISYAFILTSILRIRSNEGRSKAFGTCSSHIMAVGIFFGSITFMYFKPPSSNNMEQEKVSSVFYTTVIPMLNPLIYSLRNKDVKNALKKMVGGRQLS

SEQ ID NO: 585 - protein, 308 aa, Artificial Sequence
  Synthetic
MGTGNHSAAVVFVLVELTQQPELLLPLFILFLGIYVVTAVGNLGMILLITVSPLLHTPMYYFLSSLSCVDLCYSTVITPKMLVNFLGKKNVIVYSECMAQLFFFVIFVVAEGYLLTAMAYDRYVAICRPLLYNVIMSSRLCSLLVLVAFILGFVSALAHTSAMMNLSFCKSHIISHYFCDVLPLLNLSCSNTHLNELLLFIIGGFNTLVPTLAVAISYVFIFCSILHIKSSKGRSKSFGTCSSHLMAVGIFFGSITFMYFKPSSSNSLEQEKVSSVFYTTVIPMLNPLIYSLRNKDVKKALGRFFVGR

SEQ ID NO: 586 - protein, 308 aa, Artificial Sequence
  Synthetic
MGTGNHSVTVVFVLVGLTQQPELLLPLFILFLGIYVVTAVGNLGMILLITVSPLLHTPMYYFLSSLSCVDLCYSTVITPKMLVNFLGKKNLIVYSECMAQLFFFVIFVVAEGYLLTAMAYDRYVAICRPLLYNVIMSSRLCSLLVLVAFILGFVSALAHTSAMMNLSFCKSHVISHYFCDVLPLLNLSCSDIKLNELLLFIIAGFNTLVPTLAVAISYVFIFCSILHIKSSKGRSKAFGTCSSHLMAVGIFFGSITFMYFKPPSSNSLEQEKVSSVFYTTVIPMLNPLIYSLRNKDVKKALGKCLAGR

SEQ ID NO: 587 - protein, 308 aa, Artificial Sequence
  Synthetic
MATGNHSAAVVFVLVGLTQQPELLLPLFILFLGIYVVTAVGNLGMILLITVSPLLHTPMYYFLSSLSFVDLSYSTVITPKMLVNFLGKKNFITYSECMAQFFFFAVFVVTEGYLLTVMAYDHYVAICRPLLYNVMMSSKHCLLLVLVAFTLGLFSAVVHTSAMMSLNFCKTYIISHYFCDALPLLKLSCSNTHLNELLIFIIGGINTLVPTLAVAISYVFIFCSIRHIKSSKSRSKAFGTCSSHLMAVGIFFGSITFMYLKPSSSNSLEQEKVSSVFYTTVIPMLNPLIYSLRNKDVKKALGRFSVRR

SEQ ID NO: 588 - protein, 308 aa, Artificial Sequence
  Synthetic
MTMENYSMAAQFVLDGLTQQAELQLPLFLLFLGIYVVTVVGNLGMILLIAVSPLLHTPMYYFLSSLSFVDFCYSSVITPKMLVNFLGKKNTILYSECMVQLFFFVVFVVAEGYLLTAMAYDRYVAICSPLLYNAIMSSWVCSLLVLAAFFLGFLSALTHTSAMMKLSFCKSHIINHYFCDVLPLLNLSCSNTHLNELLLFIIAGFNTLVPTLAVAVSYAFILYSILHIRSSEGRSKAFGTCSSHLMAVVIFFGSITFMYFKPPSSNSLDQEKVSSVFYTTVIPMLNPLIYSLRNKDVKKALRKVLVGK

SEQ ID NO: 589 - protein, 308 aa, Artificial Sequence; identical to SEQ ID NO: 588
  Synthetic

SEQ ID NO: 590 - protein, 310 aa, Artificial Sequence
  Synthetic
MSPGNHSEASLFVLEGLTDQPGLQIPLFSLFLLIYLVSMAGNLGLVFLIRISSQLHTPMYHFLSNLSFIDLCYSSVIIPKMLVNFVSEKNFTAFPECMVQLFLFSFFGIDDSYMLTAMAYDRYVAICNPLLYNVTMSHRVCMLLSTAVYAMGAFGATVHTSYISSRSFCGTNVIHHYFCDILPLINIACSRDYTKEFWVMILVGFNVFASVFSIFISYAFILASILRIRSADGRSKAFSTCSSHLAAVGVFYGSIIFMYFKPSTGNTTQEKVASVFYTTVIPMLNPLIYSLRNKDVKEAIKKALNSGLFS

SEQ ID NO: 591 - protein, 310 aa, Artificial Sequence; identical to SEQ ID NO: 590
  Synthetic

SEQ ID NO: 592 - protein, 294 aa, Artificial Sequence
  Synthetic
MFQGNLSGVTEFNLAGLTDKPGLQLPLFLLFLGIYVVTVVGNLSMITLILFSSQLHTPMYYFLSSLSFIDLCQSIVIIPKMLVNFVTVQNIISYPECMTQFCIFATFTIAECHMLAVMAYDRYVAICKPLLYNAVMSYQVCSWMIFGVYIMAFVGATTQTVFMLKVHFCKANVINHYFCDLSPLLELSCSDTFINEVLALCFSVFNIFIPTLTILSSYIFIIASILRIKSTEGRSKAFSTCSSHISAVAIFFGSLAFMYLQPSSINSMDQRKVSSVFYTIVVPMLNPLIYSLRQ

SEQ ID NO: 593 - protein, 314 aa, Artificial Sequence
  Synthetic
MFQGNLSGVTEFNLAGLTDKPGLQVPLFLLFLGIYVVTVVGNLSMITLILFSSQLHTPMYYFLSSLSFIDLCQSNVIIPKMLVNFLAVKNIISYPECLTQLCFFATFGIAECQMLAVMAYDRYVAICKPLLYNAVMSFQVCSWMIFGVFSMALIGATTQTVCMLRVDFCNANVINHYFCDLSPLLKLSCSDTFINEVLALCFSVFNIFIPTLTILSSYIFIIASILQIKSTEGRSKAFSTCSSHISAVAIFFGSLAFMYLQPSSVSSMDQGKVSSVFYTIVVPMLNPLIYSLRNKDVKVALNKFLERIFSCKQN

SEQ ID NO: 594 - protein, 311 aa, Artificial Sequence
  Synthetic
MLKGNLSEVTEFILAGLTNKPELQLPLFFLFLAIYVVTVVGNLGMITLILFSSQLHTPMYFFLSSLSFIDLCQSTVIIPKMLVNFVTVKNIISYPECMTQLYFFVTFAIAECHMLAVMAYDRYVAIGNPLLYNIMMSYRVCSWMIFGVYIMAFIGATSHTVCMLRVHFCKTDVINHYFCDIYPLLELSCSDTFINEVVLLCFSVFNFLIPTLTILSSYIFIIASILRIKSTEGRYKAFSTCSSHISAVAIFFGSTAFMYLQPSSVNSMDQGKVSSVFYSIVVPMLNPLIYSLRNKDVKVALNKFFERKFFL

SEQ ID NO: 595 - protein, 311 aa, Artificial Sequence
  Synthetic
MLKGNLSEVTEFILAGLTNKPELQLPLFLLFLAIYVVTVVGNLGMIILILLSSHLHTPMYYFLSSLSFIDLCQSTVIIPKMLVNFVTVKNIISYPECMTQLYFFVTFAIAECHMLAVMAYDRYVAICNPLLYNAVMSFQVCSSMIFGVYSIALIGATTHTVCMLRVNFCKANVINHYFCDLFPLLELPCSDTFINEVVVLCFSVFNIFIPTLTILTSYIFIIASILRIKSTEGRSKAFSTCSSHISAVAIFFGSLAFMYLQPSSVSSMDQGKVSSVFYTIVVPMLNPLIYSLRNKDVKVALNKFFERKFFL

SEQ ID NO: 596 - protein, 310 aa, Artificial Sequence
  Synthetic
MIAGNYSMVTEFILAGLTSTPELQLPLFFLFLGIYAVTMVGNLGMITLILLSSHLHTPMYFFLSSLSFIDLCHSTVITPKMLVNFVTVKNIISYPECMTQLYFFLVFVISECHMLAAMAYDRYVAICNPLLYNAMMSYQVCTWMIFGVYSMGFIGATAHTVCMLRVHFCKVDVINHYFCDLFPLLELSCSPTFINEVVVLCFSAFNILFPTLSILSSYIFIIASILRIKSTEGRSKAFSTCSSHISAVAVFFGSAAFMYLQPSSVSSMDQGKVSSVFYTIVVPMLNPLIYSLRNKDVKVALTKFYEKSFS

SEQ ID NO: 597 - protein, 312 aa, Artificial Sequence
  Synthetic
MAYSNQSRVTEFIISGLTNKPELQLPLFLLFLGIYLFTVLGNLGMIILILLSSHLHTPMYFFLSSLSFIDLCYSTIITPKMLVNFVTTKNVISYQECMTQLYFFIAFVISECHMLAAMAYDRYVAICNPLLYNVTMSYQVCSWMVGGVYGMGFIGAAIHTFCMLRVVFCKDNIINHYFCDLFPLMELACSSTYVNEVVLLSLSAFNIFIPTLTILGSYIFIIISILRIKSTEGRFKAFSTCSSHFSAVSVFFGSLAFMYLQPFSVSSKDKGKVSSVFYTTIVPMLNPMIYSLRNRDVKLALNKLFQKKKFHV

SEQ ID NO: 598 - protein, 315 aa, Artificial Sequence
  Synthetic
MQVQMADTNHSTVTEFILAGLTDKPELQLPLFLLFLGIYLLTVLGNLGMIILILLSSHLHTPMYFFLSSLSFIDLCYSTVITPKMLVNFVAKKNVISYEECMTQLYFFLAFVISECHMLAAMAYDRYVAICNPLLYNVTMSYQICSWMVGGVYGMGLIGAAVHTLCMLRVVFCKANIINHYFCDLFPLMELACSSTYVNEVVLLCLSAFNIFIPTLTILGSYIFIIISILRIKSTEGRFKAFSTCSSHFSAVSVFFGSLAFMYLQPFSVSSKDKGKVSSVFYTTIVPMLNPMIYSLRNRDVKLALNKLFQKKFHV

SEQ ID NO: 599 - protein, 312 aa, Artificial Sequence
  Synthetic
MAEGNQSTVTEFILTGLTNKPELQLPLFLLFLGIYLFTELGNLGMVILISISSHLHTPMYFFLSSLSFIDLCYSTVIIPKMLVNFVTEKNIISYPECMTQLYCFLVLVISECYMLSAMAYDRYVAICNPLRYNVTMSYQVCLWMIGGVYCIGLIEATLHTVCMLRVLFCKANVVNHFFCDLLPLLQLACSSTFVNEVVLLCFSTFNFCVPMLTILSSYSFIIARILRIKSTESRFKAFSTCSSHFTSVAVFFGSLGFMYFQPSSVSSEDQGKVSSVFYTTVVPMLNPLIYSLRNKDVKVALNKLLRKKTFHM

SEQ ID NO: 600 - protein, 311 aa, Artificial Sequence
  Synthetic
MAEGNFSIVTEFILTGLTEKPALQLPLLFLFLGIYVVTVIGNLGMVMLILFSSHLHTPMYFFLSNLSFVDLCQSSVIMPKMLEKFVMVKSVISYAECMAQFYLFDVFAVSECHMLAVMAYDRYVAICNPLLYNVTMSYKVCSWMVVGVYSVGLICATGETVCLLRLLFCKAGDINHYFCDLLPLLEQSCSNTFINEILGLSFSSFNITVPALTILSSYIFIIASILRIPSTEGRSKAFSTCSSHILAVAVFFGSLAFMYLQPSSVSSMDQGKVSSVFYTIVVPMLNPLIYSLRNKDVKVAFYKVVGRREFM

SEQ ID NO: 601 - protein, 300 aa, Artificial Sequence
  Synthetic
MIMEFILTGFPTKPELQLPLFLLFLGIYLVTVLGNLGMIILIVLSSGLHTPMYFFLSSLSFIDLCHSTVITPKMLLNFLLEENIISYPECMTQLYFFSLFAIAECHMLAVMAYDRYVAICNPLLYKVVMSHHVCFWFTVGVYTLGILGSSVHTGLMLKLFFCKTNKINHYFCDLFPLLELSCSSIYINELLVLFLSALNILTPALTILMSYILIIVSILRIRSTEGRSKAFSTCSSHISAVALFYGSAAFTYLQPSSVSSMNQGKVSSVFYTTVVPMLNPLIYSLRNKDVKSSIKKILNR

SEQ ID NO: 602 - protein, 307 aa, Artificial Sequence
  Synthetic
MGTGNHSMVTEFILAGFSTKPELHLPLFLLFLGIYLLTVLGNLGMIILILLSSHLHTPMYFFLSSLSFIDLCHSTVITPKMLVNFVTEKNIISYPECMTQLYCFLVFAIAECHMLAVMAYDRYVAICNPLLYNVVMSHHLCFWLTVGVYSLGIVGSSVHTGFMLKLNFCKINVINHYFCDLFPLLELSCSSIYINELLVLFLSALNILTPALTILMSYIFIIVSILRIRSTEGRSKAFSTCSSHISAVAIFYGSAAFMYLQPSSVSSMDQGKVSSVFYTTVVPMLNPLIYSLRNKDVKSAVKKILNR

SEQ ID NO: 603 - protein, 291 aa, Artificial Sequence
  Synthetic
MSAGNHSSVTEFILAGLSEQPELQLRLFLLFLGIYVVTVVGNLSMITLIGLSSHLHTPMYYFLSGLSFIDICHSTIITPKMLVNFVTEKNIISYPECMTQLYFFLIFAIAECHMLAVTAYDRYVAICSPLLYNVIMSYHHCFWLTVGVYILGILGSTIHTGFMLRLFLCKTNVINHYFCDLFPLLGLSCSSTYINELLVLVLSAFNILTPALTILASYIFIIASILRIRSTEGRSKAFSTCSSHILAVAVFFGSAAFMYLQPSSVSSMDQGKVSSVFYTIVVPMLNPQSIA

SEQ ID NO: 604 - protein, 314 aa, Artificial Sequence
  Synthetic
MEELNHTPVAEFILAGLTENPELQLPLFLIFLSVYLFTVVGNLGMIVLILISSQLHTPMYYLLSSLSFIDCCQSTVIVPKMLLNFVTEKNVILYPECIAQFYFFCTFVVAKCHMLAAMAYDRYVAISNPLLYKVTMSYQVCLLMVAVVYGIGLISATAHTVFLLRLFFCKADKINHYFCDLFPLLELSCSSTFINEILALSFSAFNIIVPAMTIIGSYIFIIISILHIKSSGGRVKAFSTYSSHILAVAIFFGSTTFMYLQPSSVSSMDQWKVSSVFYTIVVPVLNLMIYSLRNKDVKVALKMLLQKMFPQNKE

SEQ ID NO: 605 - protein, 314 aa, Artificial Sequence
  Synthetic
MEELNHTSVTEFILAGLTENPELQLPLFLTFLSVYLFTVVGNLGMIVLILISSQLHTPMYYLLSSLSFIDCCQSTVIVPKMLLNFVTEKNVILYPECIAQFYFFCTFVVAECHMLAAMAYDRYVAISNPLLYKVTMSYQVCLLMVAVVYGIGLISATAHTVFLLRLFFCKADKINHYFCDLFPLLELSCSSTFINEILALSFSAFNIIVPAMTIIGSYIFIIISILHIKSSGGRVKAFRTCSSHILAVAIFFGSTTFMYLQPSSVSSMDQGKVSSVFYTIVVPMLNPMIYSLRNKDVKVALKKLLQKMFPQNKE

SEQ ID NO: 606 - protein, 315 aa, Artificial Sequence
  Synthetic
MEEINDTSVAEFILTGLTENPELQLPLFLIFLAVYLVTVVGNLGMIVLILISSQLHTPMYYLLRSLSFIDCCQSTVIIPKMLLNFVTEMNIISYPQCIAQFYFFCAFAVSECHMLAAMAYDRYVAISNPLLYNVTMSYQVCSLMVAVVYGIGLISATAHTVFLLRVLFCKSDIINHYFCDLFPLLELSCSSTYINEVLALSFSAFNIIVPALTILSSYIFIIVSVLHIQSTGGRVKAFRTCSSHIMAVAIFFGSTVFMYLQPSSVSSMDQGKVSSVFYTIVVPMLNPLIYSLRNKDVRVSLKKLLQKISFLKTKN

SEQ ID NO: 607 - protein, 306 aa, Artificial Sequence
  Synthetic
MEKGNQSTVNKFFLSGLTEQPELQLPLFLLFLGIYLLTVLGNLGMIILILLSSYLHTPMYFFLSSLSFIDFCQSTVITPKMLVKFVREKNEISYPECITQLCFFVIFAVSESYMLAAMAYDRYVAICSPLLYSSIMSQHKCLSLVLGVYILGIVCASAHVGCIFRIDFCKSDLINHYFCDLISILNLSCSNIFVNDLVILIFSLINTIFPTLTILSSYAFIIISILRIKSTEGRSKAFSTCSSHISAVAIFYISAGFTYLNPSSSHSMDEGKVSSIFYTIIVPMLNPLIYSLRNKDVKIALKKMIE

SEQ ID NO: 608 - protein, 308 aa, Artificial Sequence
  Synthetic
MEQGNHSTVKKFFLSGLTEQPELQLPLFLLFLGIYLLTVLGNLGMIILILLSSHLHTPMYFFLSSLSFIDLCQSTVITPKMLVNFVREKNEISYPECITQLYFFLLFAISECYMLAAMAYDRYVAICSPLLYSSIMSQHKCLSIVLGVYIIGIVCASAHVGCMFRIDFCRYDVINHYFCDLISILKLSCSDAFVNELMILIFSGVNIIAPTLTILSSYVFIIMSILRIKSTEGRSKTFSTCSSHISAVAVFYGSAAFMYLNPSSSNSMDEGKVSSIFYTIIVPMLNPLIYSLRNKDVNIALKKMIQRR

SEQ ID NO: 609 - protein, 315 aa, Artificial Sequence
  Synthetic
TMFFLSPANHSFVTKFILVGLTEKSELQLPLFLVFLGIYVVTVLGNLGMITLIGLSSHLHTPMYCFLSSLSFIDFCHSTVITPKMLVNFVTEKNIISYPECMTQLYFFLVFAIAECHMLAAMAYDGYVAICSPLLYSIIISNKACFSLILVVYVIGLICASAHIGCMFRVQFCKFDVINHYFCDLISILKLSCSSTYINELLILIFSGINILVPSLTILSSYIFIIASILRIRYTEGRSKAFSTCSSHISAVSVFFGSAAFMYLQPSSVSSMDQGKVSSVFYTIVVPMLNPLIYSLRNKDVHVALKKTLGKRTFL

SEQ ID NO: 610 - protein, 311 aa, Artificial Sequence
  Synthetic
MAAENHSFVTKFILVGLTEKSELQLPLFLVFLGIYVVTVLGNLGMITLIGLSSHLHTPMYCFLSSLSFIDFCHSTVITPKMLVNFVTEKNIISYPECMTQLYFFLVFAIAECHMLAAMAYDGYVAICSPLLYSIIISNKACFSLILVVYVIGLICASAHIGCMFRVQFCKFDVINHYFCDLISILKLSCSSTYINELLILIFSGINILVPSLTILSSYIFIIASILRIRYTEGRSKAFSTCSSHISAVSVFFGSAAFMYLQPSSVSSMDQGKVSSVFYTIVVPMLNPLIYSLRNKDVHVALKKTLGKRTFL

SEQ ID NO: 611 - protein, 314 aa, Artificial Sequence
  Synthetic
MEDMPAGNHCTVTVFFLAGLSEQSELQLPLFLFFTGIYLITVSGNLGMIILIGLSSNLHTPMYYFLSSLSFIDFGQSTVVTPKMLVSFLTEKNLITYPECLAQLYFAIIFGTAESYTLAAMAYDRYVAICNPLVYNIAMSSQIYCSLISGVYIFAVFCASVNMGFMFRIQFCKSDVINHYFCDFLPLLKLACSNTYVSEMLILFFGTLNIFVPMLTIITSYISIISSILRISSSEGRSKAFSTCSSHISAVAVFYGSTAFVYLQPSRVSSIDQGKVSSVFYTTVVPMLNPLIYSLRNKDVSVAMKKILERKRFM

SEQ ID NO: 612 - protein, 314 aa, Artificial Sequence
  Synthetic
MEDMTAGNHCTVTVFFLAGLSEQSELQLPLFLFFTGIYLITVSGNLGMIILIGLSSNLHTPMYYFLSSLSFIDFGQSTVVTPKMLVSFLTEKNFITYPGCMTQLYFVIIFGTAESYTLAAMAYDHYVAICNTLVYNIAMSSQIYCSLISGVYIFAVFCASVNMGFMFRIQFCKSDVINHYFCDFLPLLKLACSNTYVSEMLILFFGTLNIFVPMLTIITSYISIISSILRIHSREGRSKAFSTCSSHISAVAIFYGSGVFVYLQPSQVSSMDQGKVSSVFYTTVVPMLNPLIYSLRNKDVSDALKKILERKTFM

SEQ ID NO: 613 - protein, 314 aa, Artificial Sequence
  Synthetic
MEDMTSGNNCTVTEFFLAGLSEEPELQLPLFLLFTGIYLITVAGNLGMITLIGISSHLHTPMYYFLSSLSLIDFCQSTVVIPKMLMSFLMEKNLISYPGCMAQLYFFITFGIAECYTLAAMAYDRYVAICNPLLYNATMSSQIYTSLILGVYIFAVICASVNTGFMSRIKFCKSDVISHYFCDFLPLLKLACSDIYINEMLILSFGTVNICVPLLTVITSYIFIIASILRIRSSEGRSKAFSTCSSHISAVAVFYGSAAFTYLQPSSVSLIDQGKVSSVFYTTVVPMLNPLIYSLRNKDVTVALKTILERKKFM

SEQ ID NO: 614 - protein, 319 aa, Artificial Sequence
  Synthetic
MEDMTSGNNCTVSEFFLAGLSEEPELQLPLFLLFTGIYLITVVGNLGMITLIGISSHLHTAMYFFLSSLSFIDFCQSTVVTPKMLVSFLTEKNIISYLGCMAQLYFFIIFGAAECYTLAAMAYDRYVAICNPLLYTVVMSYQVYSSLISGVYIYAVFCASVHTGVLTRIQFCKLDVINHYFCDILPLLKLACSNTYIDEMLILFFGTLNIFAPTLIIITSYIFIIASIFHIRSREGRSKAFSTCSSHISAVAIFYGSAAFMYLQPSRVNSMDQGKVSSVFYTTVVPMLNPLIYSLRNKDVTVALKKILERKNFMWSEVT

SEQ ID NO: 615 - protein, 318 aa, Artificial Sequence
  Synthetic
MAAANHCIVTEFFLAGLSENQKVQLPLFLLFVAIYLITVAGNLGMIALIGISSHLHTPMYYFLSSLSFIDFCQSTVVTPKMLVSLLTKKNIISYSGCMVQLYFFISFGTAECYTLAVMAYDRYVAICNPLRYNVTMSYQIYSSLISGVYIYAVFCASVNTGFIIRIQFCKLNVINHYFCDLLPLLKLACSNTYINEILILFFGSVNICVPMLTVITSYIFIIASILRIRSSEGKFKAFSTCSSHISAVAILYGSTAFTYLQPSSVSLVDQGKVSSVFYTTVVPMLNPLIYSLRNKDVTLALKRILEQKRLYVSRSRVK

SEQ ID NO: 616 - protein, 314 aa, Artificial Sequence
  Synthetic
MEDMAAGNHCTVTEFFLAGLSEKPELQLPLFLLFTGIYLITMAGNLGMITLIGLSSHLHTPMYYFLSSLSFIDFCQSTVVIPKMLVSFLTEMNIISYSECMAQLYFFLTFGIAECYTLAAMAYDRYVAICNPLLYNVTMSYQIYSSLISGVYIFAVICSSFNTGFMLRTQFCNLDVINHYFCDLLPLLNLASSNTYINEILILFFATLNSFVPVLTIITSYIFIIVTILSIHSREGKFKAFSTCSTHISAVAIFYGSGAFTYLQPSSLNSMGQAKVSSVFYTTVVPMLNPLIYSLRNKDVSIALKKILERKKFM

SEQ ID NO: 617 - protein, 311 aa, Artificial Sequence
  Synthetic
MAAGNHCTVTEFFLVGLSEKPEFQLPLFLLFLGIYLITVTGNVGMITLIGLSSHLHTPMYFFVRSLSFIDFCQSTVVIPKMLMSFLTEKNIISYSGCMVQLYFFFIFGIAECYTLAAMAYDRYVAICNPLLYNVTMSYQIYNSLISGSYIFAVVCSSLITGFMFRIQFCNLDVINHYFCDLLPLLNLASSNIYINEILILVIATLNVFIPVMTIITSYIFIIATILYIHSSEGKFKGFSTCSTHISAVAIFYGSGAFTYLQPSLLNSMGQAKVSSVFCTTVVPMLNPFIYSLRNKDVSFALKKIFERKKFM

SEQ ID NO: 618 - protein, 314 aa, Artificial Sequence
  Synthetic
MNDMTSGNYCTVTEFFLAGLSEKPELQLPLFFLFIGIYMITVAGNLGMIILIGLSSHLHTPMYYFLSSLSFIDFCQSTVVTPKMLVNFVTEKNIISYPGCMTQLYFFLIFAIAECYILAAMAYDRYVAICNPLLYNVTMSYQIYIFLISGVYIIGVICASAHTGFMVRIRFCKLDVINHYFCDLLPLLKLACSNTYINEMLILFFGTLNIFVPILTIITSYIFIIASILRIRSTEGRSKAFSTCSSHILAVAVFFGSLAFMYLQPSSVSSMDQGKVSSVFYTIVVPMLNPLIYSLRNKDVAVALKKIIERKTFM

SEQ ID NO: 619 - protein, 311 aa, Artificial Sequence
  Synthetic
MATGNYCMLPEFILTGLSKKPQLQMPLFLLFLGIYVVTVVGNLGMITLIKLSSHLHTPMYYFLSSLSFIDLCHSTVITPKMLVNFVIEKNIISYTGCMAQLYFFLIFAIAECHMLAAMAYDRYVAICNPLLYNVTMSYQIYTSLIFGVYIIGVVCASAHTGFMIRIQFCNLEVINHYFCDLLPLLELAHSSTYVNELLVLCFGTFNIVVPTMTILTSYIFIIANILRIRSTGGRSKAFSTCSSHILAVAVFFGSAAFMYLQPSSVSSMDQGKVSSVFYTIVVPMLNPLIYSLRNKDVSVALKKILERKLFM

SEQ ID NO: 620 - protein, 309 aa, Artificial Sequence
  Synthetic
MSMENSSTGTKFILLGMTDNYQLAVLLFGLFFIIYFITVLGNLGLVVLIQVSHRLHTPMYFFLSNLSFLDVCFSSITTPKTLVNLLSQLQEVSFFGCMAQMGLFIVFASAECNILASMAYDRYTAICRPLLYHITMSKVRCLLLVAGCYLGGLLNMVAVTTSITQLSFCQPQVISHFFCDIPPLLALACSDPWVTQVLVVGCGGFTLVTSVMVILVSYLSIFMTIMGIPSVSGKQKAFSTCASHLTAVALYYGTTMYTYLQPSRHGSQAGNRMISVFYTMLIPMLNPLIYSLRNQEVKVALQKILRHSQ

SEQ ID NO: 621 - protein, 309 aa, Artificial Sequence; identical to SEQ ID NO: 620
  Synthetic

SEQ ID NO: 622 - protein, 316 aa, Artificial Sequence
  Synthetic
GELALASGNHTPVTKFILQGFSNYPDLQELLFGAILLIYAITVVGNLGMMALIFTDSHLQSPMYFFLNVLSFLDICYSSVVTPKLLVNFLVSDKSISFEGCVVQLAFFVVHVTAESFLLASMAYDRFLAICQPLHYGSIMTRGTCLQLVAVSYAFGGANSAIQTGNVFALPFCGPNQLTHYYCDIPPLLHLACANTATARVVLYVFSALVTLLPAAVILTSYCLVLVAIGRMRSVAGREKDLSTCASHFLAIAIFYGTVVFTYVQPHGSTNNTNGQVVSVFYTIIIPMLNPFIYSLRNKEVKGALQRKLQVNIFPG

SEQ ID NO: 623 - protein, 311 aa, Artificial Sequence
  Synthetic
MGKENCTTVAEFILLGLSDVPELRVCLFLLFLLIYGVTLLANLGMTALIQVSSRLHTPVYFFLSHLSFVDFCYSSIIVPKMLANIFNKDKAISFLGCMVQFYLFCTCGVTEVFLLAVMAYDRFVAICNPLLYMVTMSQKLRVELTSCCYFCGTVCSLIHSSLALRILFYRSNVINHFFCDLPPLLSLACSDVTVNETLLFLVATLNESVTIMIILTSYLLILTTILKIHSAESRHKAFSTCASHLTAITVSHGTILYIYCRPSSGNSGDVDKVATVFYTVVIPMLNPLIYSLRNKDVNKALRKVMGSKIHS

SEQ ID NO: 624 - protein, 311 aa, Artificial Sequence
  Synthetic
MGKENCTTVAEFILLGLSDVPELRVCLFLLFLLIYGVTLLANLGMIALIQVSSRLHTPMYFFLSHLSSVDFCYSSIIVPKMLANIFNKDKAISFLGCMVQFYLFCTCVVTEVFLLAVMAYDRFVAICNPLLYTVTMSWKVRVELASCCYFCGTVCSLIHLCLALRIPFYRSNVINHFFCDLPPVLSLACSDITVNETLLFLVATLNESVTIMIILTSYLLILTTILKMGSAEGRHKAFSTCASHLTAITVFHGTVLSIYCRPSSGNSGDADKVATVFYTVVIPMLNSVIYSLRNKDVKEALRKVMGSKIHS

SEQ ID NO: 625 - protein, 312 aa, Artificial Sequence
  Synthetic
MGKENCTTVAEFILLGLSDVPELRVCLFLLFLLIYGVTLLANLGMIALIQVSSRLHTPMYFFLSHLSSVDFCYSSIIVPKMLANIFNKDKAISFLGCMVQFYLFCTCVVTEVFLLAVMAYDRFVAICNPLLYTVTMSWKVRVELASCCYFCGTVCSLIHLCLALRIPFYRSNVINHFFCDLPPVLSLACSDITVNETLLFLVATLNESVTIMIILTSYLLILTTILKMGSAEGRHKAFSTCASHLTAITVFHGTVLSIYCRPSSGNSGDADKVATVFYTVVIPMLNSVIYSLRNKDVKEALRKVMGCQNSLL

SEQ ID NO: 626 - protein, 312 aa, Artificial Sequence
  Synthetic
MDEENCSTVAQFILLGFSDVPELRGVLSLLFLLIYGVTALANLGMTALIQVSSQLHTPMYFFLSHLSFVDFCYSSVIVPKMLANIFNKDKAISFLACMVQFYLFCTCVVTEVFLLAVMAYDRFVAICNPLLYTATMSSDLRMILVSGCYLCASMCSLIHLCLALEIPSFKSNVINHFFCDLPPLLSLACSDVTVNKVLLFVVATFNESFSIVVIFTSYLFILITILRMRSVEGRRKAFSTCASHLTVIIVFHGTILSIYCSSTSDNSGDADKVATVFYTVVIPMLNPLIYSLRNKDVKGALRKVVNSKIYSQ

SEQ ID NO: 627 - protein, 312 aa, Artificial Sequence
  Synthetic
MDEENCSTVAQFILLGFSDVPELSGVLSLLFLLIYGVTALANLGMTALIQVSSQLHTPMYFFLSHLSFVDFCYSSVIVPKMLANIFNKDKAISSLACMVQFYLFCTCVVTEVFLLAVMAYDRFVAICNPLLYTAIMSSNLRMILVSGCYLCASMCSLIHLCLALEIPSFKSNVINHFFCDLPPLLSLACSDVTVNKVLLFVVATFNESFSIVVIFTSYLFILITILRMRSVEGRRKAFSTCASHLTVIIVFHGTILSIYCSSTSDNSGDADKVATVFYTVVIPMLNPLIYSLRNKDVKGALRKVVNSKIYSQ

SEQ ID NO: 628 - protein, 319 aa, Artificial Sequence
  Synthetic
MEEVNCTFMAEFILLGFSDVPELAIFLFLVFLVIYGVTVIANLGMTVLIQVSSQLHTPMYFFLSHLSFVDFCYASIIVPKMFTDIINQDQVISYLECMLQFYLFCTFAITEVFLLAVMAYDRFVAICNPLLYTVIMSPKLRLVLVSCCYLYASVCSLIHLCLALEITSFKSNVINHFFCDLPPLLSLACSDVSTNEFFLFIIVNFNEILTIVIIFTSYLFILITILKMRSAEGRRKAFSTCASHLTVIMVFHGTILFIYCQPNSGNSLDVDKVTTVFYTVIIPMLNPLIYSLRNKDVKEALRKMLGSKKNSLLDFFFFV

SEQ ID NO: 629 - protein, 314 aa, Artificial Sequence
  Synthetic
MMASERNQSSTPTFILLGFSEYPEIQVPLFLVFLFVYTVTVVGNLGMIIIIRLNSKLHTIMCFFLSHLSLTDFCFSTVVTPKLLENLVVEYRTISFSGCIMQFCFACIFGVTETFMLAAMAYDRFVAVCKPLLYTTIMSQKLCALLVAGSYTWGIVCSLILTYFLLDLSFCESTFINNFICDHSVIVSASYSDPYISQRLCFIIAIFNEVSSLIIILTSYMLIFTTIMKMRSASGRQKTFSTCASHLTAITIFHGTILFLYCVPNPKTSSLIVTVASVFYTVAIPMLNPLIYSLRNKDINNMFEKLVVTKLIYH

SEQ ID NO: 630 - protein, 315 aa, Artificial Sequence
  Synthetic
MMASERNQSSTPTFILLGFSEYPEIQVPLFLVFLFVYTVTVVGNLGMIIIIRLNSKLHTIMYFFLSHLSLTDFCFSTVVTPKLLENLVVEYRTISFSGCIMQFCFACIFGVTETFMLAAMAYDRFVAVCKPLLYTTIMSQKLCALLVAGSYTWGIVCSLILTYFLLDLSFCESTFINNFICDHSVIVSASYSDPYISQRLCFIIAIFNEVSSLIIILTSYMLIFTTIMKMRSASGLQKTFSTCASHLTAITIFHGTILFLYCVPNPKTSSLIVTVASVFYTVAIPMLNPLIYSLRNKDINNMFEKLVVTKLIYHI

SEQ ID NO: 631 - protein, 320 aa, Artificial Sequence
  Synthetic
MLLTYGNNSGAMFILLSFSDYPEIEMPLFLVFLAIYSITVVGNIGMIVIIRINPKLHTPMYFFLSHLSFVDFCYSSVIAPKMLVNLFIKDRAISFLECIVQYFFFAIFVVTETILLVVMAYDRFVAICRPLLYTVAMSQKLCISLVVGSYAWGLICSLTMTCSIIQLSFVGINTIDHFFCEFSSLLVLSCSDTHVNQILLFSLSTVNALSTLLIILLSYMFILVTILKMQSSRGRQKAFYTCASHLTTITIFYGTILFLYSVPNSKNSQLTFKVASLFYTLVIPMLNPLIYSLRNKDVKDTIRQIMKIKFIALPHLSSKV

SEQ ID NO: 632 - protein, 318 aa, Artificial Sequence
  Synthetic
MILSEKNNSGIIFTLLVFSDYPDLKVPLFLVFLVIYSITVVGNIGMILVIRINPQLHSPMYFFLSHLSFVDFCYSSIIAPKMLVNLVAKDITISFVECIVQYFLFCVFVVTEAFLLVVMAYDRFVAICNPLLYTVAMSQKLCITLVVGSYAWGFTCSLTLTCSTVQLSFHGVNRIDHFFCELSSLLALSSSDTLISQLLLFVFATFNAVSTLLLILLSYLFIVVTVLKMRSASGRRKAFSTCASHLAAITIFHGTILFLFCVPNSKNSRLTVKVGSVFYTVVIPMLNPIIYSLRNKDVQDTIRKIMTLISCVKNDRHN

SEQ ID NO: 633 - protein, 313 aa, Artificial Sequence
  Synthetic
MTLSDGNHSGAVFTLLGFSDYPELTIPLFLIFLTIYSITVVGNIGMIVIIRINPKLHIPMYFFLSHLSFVDFCYSSIVAPKMLVNLVTMNRGISFVGCLVQFFFFCTFVVTESFLLGVMAYDRFVAIRNPLLYTVAMSQRLCAMLVLGSYAWGVVCSLILTCSALNLSFYGFNMINHFFCEFSSLLSLSRSDTSVSQLLLFVFATFNEISTLLIILLSYVLIVVTILKMKSASGRRKAFSTCASHLTAITIFHGTILFLYCVPNSKNSRHTVKVASVFYTVVIPMLNPLIYSLRNKDVKDTVKKIIGTKVYSS

SEQ ID NO: 634 - protein, 313 aa, Artificial Sequence
  Synthetic
MLLTDRNTSGTTFTLLGFSDYPELQVPLFLVFLAIYNVTVLGNIGLIVIIKINPKLHTPMYFFLSQLSFVDFCYSSIIAPKMLVNLVVKDRTISFLGCVVQFFFFCTFVVTESFLLAVMAYDRFVAICNPLLYTVDMSQKLCVLLVVGSYAWGVSCSLELTCSALKLCFHGFNTINHFFCEFSSLLSLSCSDTYINQWLLFFLATFNEISTLLIVLTSYAFIVVTILKMRSVSGRRKAFSTCASHLTAITIFHGTILFLYCVPNSKNSRHTVKVASVFYTVVIPMLNPLIYSLRNKDVKDTVTEILDTKVFSY

SEQ ID NO: 635 - protein, 313 aa, Artificial Sequence
  Synthetic
MLLTDRNTSGTTFTLLGFSDYPELQVPLFLVFLAIYNVTVLGNIGLIVIIKINPKLHTPMYFFLSQLSFVDFCYSSIIAPKMLVNLVVKDRTISFLGCVVQFFFFCTFVVTESFLLAVMAYDRFVAICNPLLYTVNMSQKLCVLLVVGSYAWGVSCSLELTCSALKLCFHGFNTINHFFCEFSSLLSLSCSDTYINQWLLFFLATFNEISTLLIVLTSYAFIVVTILKMRSVSGRRKAFSTCASHLTAITIFHGTILFLYCVPNSKNSRHTVKVASVFYTVVIPMLNPLIYSLRNKDVKDTVTEILDTKVFSY

SEQ ID NO: 636 - protein, 321 aa, Artificial Sequence
  Synthetic
MFLTERNTTSEATFTLLGFSDYLELQIPLFFVFLAVYGFSVVGNLGMIVIIKINPKLHTPMYFFLNHLSFVDFCYSSIIAPMMLVNLVVEDRTISFSGCLVQFFFFCTFVVTELILFAVMAYDHFVAICNPLLYTVAISQKLCAMLVVVLYAWGVACSLTLACSALKLSFHGFNTINHFFCELSSLISLSYPDSYLSQLLLFTVATFNEISTLLIILTSYAFIIVTTLKMPSASGHRKVFSTCASHLTAITIFHGTILFLYCVPNSKNSRHTVKVASVFYTVVIPLLNPLIYSLRNKDVKDAIRKIINTKYFHIKHRHWYP

SEQ ID NO: 637 - protein, 314 aa, Artificial Sequence
  Synthetic
MILTDINLTSEVTFALLGFSDYPELQVPLFLLFLAIYSFSVVGNIGMMIIIKINPKLHTPMYFFLSHLSFADFCYSSIIAPKMLVNLVVEDRTISFLGCIMQFFFFCTFVVTELILFAVMAYDRFVAVCNPLLYTVVMSQRLCALLVLGSYAWGVVCSLTLTCSALNLYFRGFNTINHFFCELSSLIALSCSDSHLTQLLLFIVATFNEISTLLIILTSYLFIVVTALKMHSSSGHRKVFSTCASHMTAITIFHGTILFLYCVPNSKNSRHTVKVASLFYTVVIPMLNPLIYSLRNKDVKDTVSKLMNVRKFSQ

SEQ ID NO: 638 - protein, 316 aa, Artificial Sequence
  Synthetic
MVPLEINVSVEINFVLLGFTDYPNLQIPLFLIFLFMYIITVVGNLGMTVLINIDHKFHTPMYFFLSHLSFVDFCYSTIITPKLLENLVLADKTILYFSCMLQYFLSCVALVSESYLLAVMAYDRFVAICNPLLYTVAMSPRLCILLVTGSYIWSTFETLILLCYALQLKFSRFNVINHFFCEYTALIVVSSSDIHIPSLLLFCFATFNEVSTLLIILTSYVLIFVTVLKIKSASGRRKAFSTCASHLTAITIFHGTILSLYCVPNSKNSRNAVKVASVFYAVVNPLLNPLIYSLRNKDVKEVFQKLVSTSLKFQLH

SEQ ID NO: 639 - protein, 314 aa, Artificial Sequence
  Synthetic
MVPMERNVSVEIIFSLLGFTDYPELQIPLFLIFLFMYVITVVGNLGMIALININPKFHTPMYFFLSHLSFVDFCYSTIITPKLLENLVLADKTILYFSCMFQYFLSCVAVVSESYLLAVMAYDRFVAICNPLLYTVAMSPRLCILLVTGSYIWSIFAPLILLCYALQLKFSRFNVINHFFCEYTALIAVSSSDIHIPSLLLFCFATFNEVSTLLIILTSYVFIFVTVLKIKSASGRRKAFSTCASHLTAITIFHGTILSLYCIPNSKNSRQVVKVASVFYTVVNPMLNPLIYSLRNKDVKDAFQKLVSTKIPLQ

SEQ ID NO: 640 - protein, 314 aa, Artificial Sequence
  Synthetic
MMMVLRNLSMEPTFALLGFTDYPKLQIPLFLVFLLMYVITVVGNLGMIIIIKINPKFHTPMYFFLSHLSFVDFCYSSIVTPKLLENLVMADKSIFYFSCMMQYFLSCTAVVTESFLLAVMAYDRFVAICNPLLYTVAMSQRLCALLVAGSYLWGMFGPLVLLCYALRLNFSGPNVINHFFCEYTALISVSGSDILIPHLLLFSFATFNEMCTLLIILTSYVFIFVTVLKIRSVSGRHKAFSTWASHLTSITIFHGTILFLYCVPNSKNSRQTVKVASVFYTVVNPMLNPLIYSLRNKDVKDAFWKLIHTQVPFH

SEQ ID NO: 641 - protein, 306 aa, Artificial Sequence
  Synthetic
MMMVLRNLSMEPTFALLGFTDYPKLQIPLFLVFLLMYVITVVGNLGMIIIIKINPKFHTPMYFFLSHLSFVDFCYSSIVTPKLLENLVMADKSIFYFSCMMQYFLSCTAVVTESFLLAVMAYDRFVAICNPLLYTVAMSQRLCALLVAGSYLWGMFGPLVLLCYALRLNFSGPNVINHFFCEYTALISVSGSDILIPHLLLFSFATFNEMCTLLIILTSYVFIFVTVLKIRSVSGRHKAFSTWTSHLTAITIFHGTILFLYCVPNSKNSRQTVKVASVFYTVVNPMLNPLIYSLRNKDVKDAFWKL

SEQ ID NO: 642 - protein, 315 aa, Artificial Sequence
  Synthetic
MQHQVNQSTGVVFVFVGFSEYPNLQVPLFLIFLIIYTITVLENLGMILVIRINAKLHTPMYFFLSHLSIVDLCYTTVIAPKLLDLLITEDRSMSLKGCIIQFYFGCACVVTQNFMLAVMAYDRFVAICNPLLYTVAMSQKLCALLVTGTYLWGGLCATTLTYFLLALSYCRSSIINHFCCEYSAIISAACSDSSISQIACLLICMFNEICSLLIIIVSYVVIFTTVIKIPTKGALQKALSTCAPHLTAISFCHGIILLLYCVLKSKSSLLLVKIVTVFYSMVIPMLNPLIYSLRNKDVKETVRKLIHMKILSQSL

SEQ ID NO: 643 - protein, 318 aa, Artificial Sequence
  Synthetic
RSQVWNEGNRSMVASFILLAFSEFPNLQLPLFLVFLIMYMVTVLENLGMIFIIRMNPKLHTPMYFFLSHLSFVDFCYTSVIAPKLLDLLIVEDKSISFEGCMAQYFLGCTFVIIEMFMLAVMAYDRFVAVCNPLLYTVAMSHELCSLLVVITYIWAGIFSSTLTYILLQLSYCGPNVIDHFCCEYSALLSVSCSDTSFSQMACLVISMFNEACCLLIIITSYVFIVVTVIKIPTKGAFRKAFSTCASHLKAIGVCHGIVLLLYCVLKSKSSLFLVKVATVFHSMVIPMLNPLIYSLRNKDVKETVRKLIYLKCIFHSI

SEQ ID NO: 644 - protein, 316 aa, Artificial Sequence
  Synthetic
MAYEVMNQTSATTFILVGFSEYPQLQKPLFLLFLAIYSVTLVGNLGILVVIKVNPKLHTPMYFFLSHLSFLDICYSSVFTPKLLQILIMEDRTVSFKACMVQFFFICTFVITEMFMLAVMAYDRFVAVCNPLLYTVVMPFQFCALLVAGTYMIGGLCTVILLYTLLQLSYCEYGIINHFGCEYSAVISVSCSDSSFSQLTSLVIAIVSESSSVLITLASYVFIVVTIIKMPSKGGLRKAFSTCTSHLTAISIFHGIILLLYCVPNSNSSRLFVKVATALYTIMIPMLNPLIYSLRNKDVKDTVRRLISSKLHSHLT

SEQ ID NO: 645 - protein, 316 aa, Artificial Sequence
  Synthetic
MAYEVMNQTSATTFILVGFSEYPQLQIPLFLLFLTIYSVTLMGNLGILVVIKGNPKLHTPMYFFLSHLSFLDICYSSVFTPKLLQILIMEDRTISFIGCMIQFFFICTFVITEMFMLAVMAYDRFVAVCNPLLYTVVMPFQFCALLVAGTYMIGGLCAVILIYTLLQLSYCEYGIINHFGCEYSAVISVSCSDSSFSQLACLVISIFSESSSVLITLASYVFIVVTIIKMPSKGGLRKAFSTCTSHLTAISIFHGIILLLYCVPNSNSSRLFVKVATALYTVMIPMLNPLIYSLRNKDVKDTVRRLISSKLHSHLT

SEQ ID NO: 646 - protein, 316 aa, Artificial Sequence
  Synthetic
MAYEVVNQSSATTFILVGFSEYPQLQIPLFLLFLTIYSVTLMGNLGILVVIKVNPKLHTPMYFFLSHLSFLDICYSSVFTPKLLQILIMEDRTISFIGCMIQFFFICTFVITEMFMLAVMAYDRFVAVCNPLLYTVVMPIQFCALLVAGTYMIGGLCTLIILYTLLQLCYFEYGIINHFGCEYSAVISVSCSDSSFSQLICLVISIASEFSSVLITLASYVFIVVTIIKMPSKGGLRKAFSTCTSHLTAITIFHGILLLLYCIPNSNSSRLFVKVATALYTIMIPMLNPLIYSLRNKDVKDTVRRLISSKLHSHLT

SEQ ID NO: 647 - protein, 310 aa, Artificial Sequence
  Synthetic
NQSSVTTFILVGFSEYPHLQPPLFLMIMTIYTVTLVGNVGIILVRRINPKLHTPMYFFLSHLSFLDICYSSVFTPKLLEILIVEHRTISLNGCMTQFFFGCACVITEMFMLAVMAYDRFVAVCNPLLYTVAMSHQLCALLVAGSYMWGGLCAVIITYTLVELSYCEPGIIDHFGCEYSAIVSVSCSDPSFSQMVCLVISILSEGSSLLITMASYVFIVVTIIKMPSKDGLRKAFSTCTSHLTAISIFHGIILLLYCIPNAKSSKLLVKVATVLYTVLIPMLNPLIYSLRNKDVKETVKRLISSKLHSQTI

SEQ ID NO: 648 - protein, 310 aa, Artificial Sequence
  Synthetic
NQSSVTTFILVGFSEYPHLQPPLFLMVMTIYTVTLVGNVGIILVRRINPKLHTPMYFFLSHLSFLDLCYSSVVPPKLLEILIVEHRTISLKGCMTQFFFGCACVIIEMFMLAVMAYDRFVAVCKPLLYTVAMSHKFCALLVAGSYMWGGLGAAIITYTLVQLSYCEPGIIDHFSCEYSAIVSVSCSDPSFSQMVCLVISMLNEVSSLLITMTSYVFLIVTIIKMPSKGGLRKAFSTCTSHLTAISIFHGTILLLYCIPNAKSSKLVVKVATVLYTVLIPMLNPLIYSLRNKDVKETVKRLISSKLHSQTI

SEQ ID NO: 649 - protein, 309 aa, Artificial Sequence
  Synthetic
MEEENATLLTEFVLTGFLHQPDCKIPLFLAFLVIYLITIMGNLGLIVLIWKDPHLHIPMYLFLGSLAFVDASLSSTVTPKMLINFLAKSKMISLSECMVQFFSLVTTVTTECFLLATMAYDRYVAICKALLYPVIMTNELCIQLLVLSFIGGLLHALIHEAFSFRLTFCNSNIIQHFYCDIIPLLKISCTDSSINFLMVFIFAGSVQVFTIGTILISYTIILFTILEKKSIKGIRKAVSTCGAHLLSVSLYYGPLTFKYLGSASPQADDQDMMESLFYTVIVPLLNPMIYSLRNKQVIASFTKMFKSNV

SEQ ID NO: 650 - protein, 310 aa, Artificial Sequence
  Synthetic
CSEEMEEENATLLTEFVLTGFLHQPDCKIPLFLAFLVIYLITIMGNLGLIVLIWKDPHLHIPMYLFLGSLAFVDALLSSTVTPKMLINFLAKSKMISLSECMVQFFSLVTTECFLLATMAYDRYVAICKPLLYPVIMTNELCIQLLVLSFIGGLLHALIHEAFSFRLTFCNSNIIQHFYRDIIPLLKISCTDSSINFLMVFIFAGSVQVFTIGTILISYTIILFTILEKKSIKGIRKAVSTCGAHLLSVSLYYGPLAFKYLGSASPQADNQDMMESLFYTVIVPLLNPMIYSLRNKQVIASFTKMFKSNV

SEQ ID NO: 651 - protein, 310 aa, Artificial Sequence
  Synthetic
MEEENATLLTEFVLTGFLYQPQWKIPLFLAFLVIYLITIMGNLGLIAVIWKDPHLHIPMYLLLGNLAFVDALLSSSVTLKMLINFLAKSKMISLSECKIQLFSFAISVTTECFLLATMAYDRYVAICKPLLYPAIMTNGLCIRLLILSYVGGLLHALIHEGFLFRLTFCNSNIIQHFYCDIIPLLKISYTDSSINFLMVFIFAGSIQVFTIGTVLISYIFVLYTILKKKSVKGMRKAFSTCGAHLLSVSLYYGPLAFMYMGSASPQADDQDMMESLFYTVIVPLLNPMIYSLRNKQVIASFTKMFKRNDV

SEQ ID NO: 652 - protein, 313 aa, Artificial Sequence
  Synthetic
MEEENATLLTEFVLTGFLYQPQWKIPLFLAFLVIYLITIMGNLGLIAVIWKDPHLHIPMYLLLGNLAFVDAWISSTVTPKMLNNFLAKSKMISLSECKIQFFSFAISVTTECFLLATMAYDRYVAICKPLLYPAIMTNGLCIRLLILSYVGGILHALIHEGFLFRLTFCNSNIVHHIYCDTIPLSKISCTDSSINFLMVFIFSGSIQVFSIVTILVSYTFVLFAILKKKSDKGVRKAFSTCGAHLFSVSLYYGPLLFIYVGPASPQADDQDMVEPLFYTVIIPLLNPIIYSLRNKQVTVSFTKMLKKHVKVSY

SEQ ID NO: 653 - protein, 313 aa, Artificial Sequence
  Synthetic
MEEENATLLTEFVLTGFLYQPQWKIPLFLAFLVIYLITIMGNLGLIAVIWKDPHLHIPMYLLLGNLAFVDAWISSTVTPKMLNNFLAKSKMISLSECKIQFFSIAIGVTTECFLLATMAYDRYVAICKPLLYPAIMTNGLCIRLLILSYIAGILHALIHEGFLFRLTFCNSNIVHHIYCDTIPLSKISCTDSSINFLMVFIFSGSIQVFSIVTILISYTFVLFTVLEKKSDKGVRKAFSTCGAHLFSVCLYYGPLLLMYVGPASPQADGQNMVEPLFYTVIIPLLNPIIYSLRNKQVIVSFIKMLKRNVKVSY

SEQ ID NO: 654 - protein, 309 aa, Artificial Sequence
  Synthetic
MEQDNTTLLTEFVLTGLTYQPEWKMPLFLVFLVIYLITIVWNLGLIALIWNDPQLHIPMYFFLGSLAFVDAWISSTVTPKMLVNFLAKNRMISLSECMIQFFSFAFGGTTECFLLATMAYDRYVAICKPLLYPVIMNNSLCIRLLAFSFLGGFLHALIHEVLIFRLTFCNSNIIHHFYCDIIPLFMISCTDPSINFLMVFILSGSIQVFTIVTVLNSYTFALFTILKKKSVRGVRKAFSTCGAHLLSVSLYYGPLIFMYLRPASPQADDQDMIDSVFYTIIIPLLNPIIYSLRNKQVIDSFTKMVKRNV

SEQ ID NO: 655 - protein, 312 aa, Artificial Sequence
  Synthetic
SNEDMEQDNTTLLTQFVLTGLTYQPEWKMPLFLVFLVIYLITIVWNLGLIALIWNDPQLHIPMYFFLGSLAFVDAWISSTVTPKMLVNFLAKNRMISLSECMIQFFSFAFGGTTECFLLATMAYDRYVAICKPLLYPVIMNNSLCIRLLAFSFLGGFLHALIHEVLIFRLTFCNSNIIHHFYCDIIPLFMISCTDPSINFLMVFILSGSIQVFTIVTVLNSYTFALFTILKKKSVRGVRKAFSTCGAHLLSVSLYYGPLIFMYLRPASPQADDQDMIDSVFYTIVIPLLNPIIYSLRNKQVIDSFTKMVKRN

SEQ ID NO: 656 - protein, 309 aa, Artificial Sequence
  Synthetic
MGIENTTLLTEFVLTGLSHLPQWKIPLFLLFLVIYLITIVGNLGLITLIWNDPHLHIPMYFFLGSLAFVDTWLSSTVTPKMLLDIFSKSKLISFSECMIQFFSFGISATTECFLLASMAYDRYVAICKPLLYPVIMTNRLCVRLLTLSFVGGFIHVLIHESFLFRLTFCNSNIIHHFYCDVMPLLKISCNDPSLNYLMLFIFSGSIQVFSILTILISYTLVLFSILKQKSLKSIKKAFSTCGAHLLSVSLYYGSLLFMYVRPASPQVDDQDMMDSIFYTVIIPVLNPIIYSLRNKQVKNSLEKFLKRNT

SEQ ID NO: 657 - protein, 309 aa, Artificial Sequence
  Synthetic
MGIENTTLLTEFVLTGLSHLPQWKIPLFLLFLVIYLITIVGNLGLITLIWNDPHLHIPMYLFLGSLAFVDTWLSSTVTPKMLLDFFSKSKLISFSECMIQFFSFGISATTECFLLAAMAYDRYVAICKPLLYPVIMTNRLCVLLLTLSFVGGFIHVLIHESFLFRLTFCNSNIIHHFYCDVMPLLKISCNDPSLNYLMLFIFSGSIQVFSILTILISYTLVLFSILKQKSIKSIKKAFSTCGAHLLSVSLYYGSLLFMYVRPASPQVDDQDMMDSIFYTVIIPVLNPIIYSLRNKQVKNSLEKFLKRNT

SEQ ID NO: 658 - protein, 309 aa, Artificial Sequence
  Synthetic
METDNTTLLIQFVLSGLVHLPQWKIPLFLLFLVIYLITIVGNLGLIILIWNDPHLHIPMYLFLGSLAFVDTWLSSTVTPKMLQDIFSKSKLISFSECMIQFFSFVVSATTECFLLAAMAYDRYVAICKPLLYPVIMTNRLCVSLLTLSFLGGFIHALIHEGFLFRLIFCRSHIINHFYCDVMPLLKISCNDPSINYLMLFIFSGSIQVFTITTILVSYTLVLFSILKKKSLKSIKKAFSTCGAHLLSVSLYYGPLLFMYVRPASPQVNDEDMMDSVFYTIIIPVLNPIIYSLRNEQVKKSLAKCLRRNT

SEQ ID NO: 659 - protein, 308 aa, Artificial Sequence
  Synthetic
MEKNATLLTEFVLTGLSHQPLWNIPLFLVFLVIYLITIVGNVSLITLIWTDPHLHIPMYLFLGSLAFVDTSISSIVVPKMLLNFFGKSKVITLSECMAQFFLFNISATTECFLLAAMAYDRYVAICKPLLYPVVMTNGLCVWLIALSFVAGIIHALIHEGFLLRLTFCNSNMIHHFYCDIISLLKISCTDTSLNYLIVFIFSGSIQVFTISTILVSYTIILFTILKKKSAKGIKKAFSTCGAHLLSVSLYYGPLLFMYVHPASSEVDDQDMIDSLFYTVIIPVLNPIIYSLRNKQVIDSLAKFLKRNV

SEQ ID NO: 660 - protein, 309 aa, Artificial Sequence
  Synthetic
MEKKNETLWTEFVLTGLTCLPQWKPLLFLVFLVIYFMTIVGNLGLITLIWNDPHLHIPMYLFLSNLAFVDTWLSSTVTPRMLFNLLDKGKVISVAECKTQFFSFAISVTTECFLLAAMAYDRYAAICNPLLYPVIMTNRLCVRLLALSFIGGFLHAVIHESFLSRLTFCNSNIIYHFYCDVIPLLKISCTDPSLNYLIIFIFSGSIQVFTIMTVLISYTFVLFTILKKKSDKGIRKAFSTCGSHLLSVSLYYGPLLFMYVHPASSEVDDQDMILSLFYTVIIPVLNPIIYSLRNKQVIDSLKKMLKMMV

SEQ ID NO: 661 - protein, 309 aa, Artificial Sequence
  Synthetic
MEDGNTTLLTEFVLTGLTDHQGLQVPLFLLFLMIYLITVVGNLGLIALIWSDPHLHIPMYLFLGSLAFVDAWISSAVTPNMLFDLLSKNKMISLSECMIQFFAFAFGGTTECFLLGTMAYDRYVAICKPLLYPVIMTNRLCIRLLVSVFIGGFLHSLFHVLFLLRLTFCNSNIIHHFYCDIIPLYNISCTDPTLNLLLVFILSGSIQVFTIMTVLVSYTLVLFTILKMKSLQGIRKAFSTCGAHLLSVSLYYGPLLFMYVLPASQQTDGQGMMDSLFYTVIIPVLNPIIYSLRNKQVTDSLKKRLERHV

SEQ ID NO: 662 - protein, 307 aa, Artificial Sequence
  Synthetic
MKNSTVLTEFVLTGLTESPELQVPLFLFFLVIYLITIVGNLGLIALIWNDPHLHIPMYFFLGHLAFVDASLSSTVAPKMLLDFLQMNKMISYSECMTQFFIFAICATTECFLLGAMAYDRYVAICKPLLYPMIMTKRLCICLLVLSFVGGILHSSIHEGFLLLLNFCNSNIVHHFFCDIVPLLKISCTDTTLNFQLIFVLAGIIQVLTVVIVLVSYTLVLLTILQRKSVQSMKKAFSTCGAHLLSVSLYYGPLLIMYIFPVSQEADGQDIIDSLFYTVIIPVLNPIIYSLRNKQVMDSLKKVLKKKA

SEQ ID NO: 663 - protein, 307 aa, Artificial Sequence
  Synthetic
MAEGNRTLVTEFILMGLTDHPTLKAALFPLFLVIYLITMVGNLGLIALIWKDSHLHTPMYLFLSSLAFADSCTTSSVTPRMILNFLSTNHEITLVECFAQFYFMGSSATTECFLLSVMAYDRYLAICNPLLYPVLMSNRLCTQFIAVTYLLGVLHLAIHVGLLLRLTFCRSNIIQYYYCEILQLFNISCTDPTINVFVLLIFSISIQAFTFVTILVSYIRVLFAILRKKSEKGRSKAFSTCSAHLLSVSLFYGTLFLIYVCPGSGPVGDKEKMLSLFYTVIIPLLNPFVYSLRNKEVISAFRRVMKN

SEQ ID NO: 664 - protein, 308 aa, Artificial Sequence
  Synthetic
MAEGNRTLITEFIFMGLTDHPKLKAALFPLFLVIYLITMVGNLGLIALIWKDSHLHTPMYLFLSSLAFADSCTTSSVTPKMLLNFLSTNHEITLAECFVQFYFMGSSATTECFLLSVMAYDRYLAICNPLLYRVLMSNRLCTQFIAVAYLLGALHLAIHVGLLLRLTFCRSNIIQYYYCEILQLFNISCTDPTINVFVLLIFSISIQAFTFVTVLVSYIRVLFAILRKKSDKGRSKAFSTCSAHLLSVSLFYGTLFLIYVCPGSGPVGDKEKMLSLFYTVIIPLLNPFVYSLRNKEVIGAFRRVMKNT

SEQ ID NO: 665 - protein, 307 aa, Artificial Sequence
  Synthetic
MAERNWTLVTEFVLTGLTERPELQVPLFLVFLIIYLTTMVGNLGLIALIWKDPHLHTPMYVFLSSLAFADVCTSSSVTPRMLVNFLSTDHEISLVECFTQFYFFCSSATTECFLLLVMAYDRYVAICNPLLYPVVMSNKLCTQFIVVTYFIGVLNSTIHVGLLIRLTFCRSNVIDYFYCEIVKLLTISCTDPSINMLVVFICSIFIQASTLANIVVSYTRVLFAILRKKSEKGRSKAFSTCSAHLLSVSLFYGTLFLIYILPGSEPAEDKEQLLSIVYTIIIPLLNPFIYSLRNKEVLGALRRLIKK

SEQ ID NO: 666 - protein, 307 aa, Artificial Sequence; identical to SEQ ID NO: 665
  Synthetic

SEQ ID NO: 667 - protein, 306 aa, Artificial Sequence
  Synthetic
MTVENQTVVAVFVLTGLTERPELQVPLFLVFFTIYLITMVGNLGLIALIWKDPHLHTPMYLFLGSLAFADACASSSVTPKMLVNFLSKDHRTFLVECFTQFYFFGSSATTECFLLSVMAYDRYVAICNPLLYPVMMSNSLCMKFIHVSYIVGFLHSAIHVGLLVRLNFCKSNIIHYFYCEILQLFKISCTDPTMNVLLVLIFSALIQGLTFMTIIVSYFSVLLAILKTKSERGRRKAFSTCSAHLLSVSLFYGTLFLMYVRPGSGSGEDKDRMYSLFYTIIIPFLNPFIYSLRNKEVTAALRRKMK

SEQ ID NO: 668 - protein, 306 aa, Artificial Sequence
  Synthetic
MEVNRTLVTAFILRGITDLPELQVPMFLVFFFIYVTTMVGNLGLIVLIWKDPRLHTPMYFFLGSLAFADACTSSSVTPRMLVNILDNGKMISLSECMAQYYVFGSSATTECFLLVAMAYDRYVAICNPLLYLVVMSNRVCTCLISGSYIIGFLHPLIHVGLLFRLTFCKSNIIDHFYCEILPLYTISCTDPSINAFVVFIFAAVIQAVTFMSIAVSYAHVLFSILKTKSERGRRKAFSTCSAHLLSVSLFYGTLFFMYVSPGSGPSKYKNKMYSLFYTIVIPLLNPFIYSLRNKEVLGALRKIMKP

SEQ ID NO: 669 - protein, 306 aa, Artificial Sequence
  Synthetic
MEVNRSQVSDFVLKGITDHTELQVPLFLLFFFIYVTTMVGNLGLIFLIWKDPHLHTPMYYFLGSLAFADACTSSSVTPRMLVNILDNGKMISLSECMAQYYVFGSSATTECFLLVAMAYDRYVAICNPLLYLVVMSNRVCTCLISGSYIIGFLHPLIHVGLLFRLTFCKSNIIDHFYCEILPLYTISCTDPSINAFVVFIFSAVIQAVTFMSIAVSYAHVLFSILKTKSERGRRKAFSTCSAHLLSVSLFYGTLFFMYVSPGSGPSKYKNKMYSLFYTIVIPLLNPFIYSLRNKEVLGALRKIIKS

SEQ ID NO: 670 - protein, 305 aa, Artificial Sequence
  Synthetic
MELNRTQLTEFVLRGITDRSELQVPLFLVFFLIYVITMVGNLGLIFLIWKDPHLHTPMYLFLGNLAFADACTSSSVTPKMLMKFSNKNDMISMGECFAQFYFFCLSATAECFILVAMAYDRYVAICKPLLYVVVMSNRLCIQFIGVSYLIGLLHGLLHVGLLFRLTFCSSNVIDHFYCEILPLYRISCTDPSINVLVAFIMAILIQVSTFMSIIVSYILILFAILRTKSERGRNKAFSTCSSHLSSVSLFYGTLFIIYVLSGSDKDNYQGKMYSLFYTIIIPLLNPFIYSLRNKEVIGALRKLRE

SEQ ID NO: 671 - protein, 309 aa, Artificial Sequence
  Synthetic
MDISEGNKTLVTEFVLTGLTDRPWLHVLFFVVFLVVYLITMVGNLGLIVLIWNDPHLHMPMYLFLGGLAFSDACTSTSITPRMLVNFLDKTAMISLAECITQFYFFASSATTECFLLVMMAYDRYVAICNPLLYPVMMSNKLSAQLLSISYVIGFLHPLVHVSLLLRLTFCRFNIIHYFYCEILQLFKISCNGPSINALMIFIFGAFIQIPTLMTIIISYTRVLFDILKKKSEKGRSKAFSTCGAHLLSVSLYYGTLIFMYVRPASGLAEDQDKVYSLFYTIIIPLLNPFIYSLRNKKVMHALRRVIRK

SEQ ID NO: 672 - protein, 309 aa, Artificial Sequence
  Synthetic
MTEDNYSLATEFILIGFSDHPDLKTLLFLVFSAIYLVTMVGNLGLVTLIYIEPRLHTPMYIFLGNLALMDSCCSCAITPKMLENFFSVDRRISLYECMAQFYFLCLAETTDCFLLAAMAYDRYVAICNPLQYHSMMSKKLCLQMTTGAYIAGNLHSMIHIGFLFRLTFCRSHVIKHFFCDVLPLYRLSCVDPYINELMILIFSGSLQTFTITIVLISYICILFTIFTMKSREGRSKALSTCASHFLSVSIFYGSLLYMYIRPSSLNEGYKDIPVAIFYTLVIPLLNPFIYSLRNKEVINVMKRAMKKRL

SEQ ID NO: 673 - protein, 308 aa, Artificial Sequence
  Synthetic
MTEDNYSLTTEFILIGFSDHPDLKILLFLVFSTIYLVTMVGNLGLVALIYMEPRLHTPMYIFLGNLALMDSCCSCAITPKMLENFFSVNKRISLYECMAQFYFLCLAETADCFLLAAMAYDRYVAICNPLQYHTMMSKKLCLQMTTGAYIAGNLHSMIHIGFLFRLTFCRSHVIKHFFCDVLPLYRLSCVDPYINELMILIFSGSVQTFSIIIVLISYFCIIFTIFTMKSREGRSKALSTCASHFLSVSIFYGSLLYTYIRPSSINEGNEDIPVAIFYTLVIPLLNPFIYSLRNKEVINAIKRTMNKG

SEQ ID NO: 674 - protein, 308 aa, Artificial Sequence
  Synthetic
MTEDNYSLTTEFILIGFSDHPDLKILLFLVLSTIYLVTMVGNLGLVALIYMEPRLHTPMYIFLGNLALMDSCCSCAITPKMLENFFSVNRRISLYECMAQFYFLCLAETADCFLLAAMAYDRYVAICNPLQYHTMMSKKLCLQMTTGAYIAGNLHSMIHIGFLFRLIFCRSHVIKHFFCDVLPLYRLSCVDPYINELMILIFSGSVQTFSIIIVLISYFCILFTIFTMKSREGRSKALSTCASHFLSVSIFYGSLLYTYIRPSSINEGNEDIPVAIFYTLVIPLLNPFIYSLRNKEVINAIKRTMNKG

SEQ ID NO: 675 - protein, 308 aa, Artificial Sequence
  Synthetic
MAENNYSVTNEFILVGFSDHPDLKTPLFLVFSAIYLVTMVGNLGLVALIYMEPRLHTPMYIFLGNLALMDSCCSCAITPKMLENFFSVDRRISLYECMVQFYFLCLAETTDCFLLAAMAYDRYVAICNPLQYHSMMSKKLCLQMTMGSYIAGNLHPMIEVGLLLRLTFCRSHVIKHFFCDVLPLYRISCTDPNINELILLVLAGSIQVFTISIVLVSYSCILFTIFTMKSKEGRGKALSTCASHFLSVSIFYGSLLFMYAQPHSANEGDKDMPVAIFYTLIIPLLNPFIYSLRNKEVINVMKKTMKRR

SEQ ID NO: 676 - protein, 317 aa, Artificial Sequence
  Synthetic
MNKENHSLIAEFILTGFTYHPKLKTVLFVVFFAIYLITMVGNIGLVALIYIEQRLHTPMYIFLGNLVLMDSCCSSAITPKMLENFFSEDKRITLYECMAQFYFLCLAETTDCFLLAAMAYDCYVAICNPLQYHTMMSKTLCIQMTAGAYLAGNLHPMIEVEFLLRLTFCGSHQINHFFCDVLPLYRLSCINPYINELVLFILAGSIQIFTIVLVSYFYILFTIFTMKSKEGRGKALSTCASHFLSVSIFCDSLLFMYARPGAVNEGDKDIPVAIFYTLVIPLLNPFIYSLRNKEVINIMKKIMKKRKFCHILKQMSS

SEQ ID NO: 677 - protein, 316 aa, Artificial Sequence
  Synthetic
MARENHSLAAEFILIGFTNYPELKTLLFVVFSAIYLVTMVGNLGLVALIYVERRLLTPMYIFLGNLALMDSCCSCAVTPKMLENFFSEDRIISLYECMAQFYFLCLAETTDCFLLATMAYDRYVAICHPLQYHTMMSKTLCIRMTTGAFKAGNLHSMIHVGLLLRLTFCRSNKIHHFFCDILPLYRLSCTDPSINELMIYIFSIPIQIFTIATVLISYLCILLTVFKMKSKEGRGKAFSTCASHFLSVSIFYICLLMYIGPSEEGDKDTPVAIFYAIVIPLLNPFIYSLRNKEVINVLKKIMRNILKQTCSIANLF

SEQ ID NO: 678 - protein, 317 aa, Artificial Sequence
  Synthetic
MRLEKTNHSLTTQFILVGFSDHPDLKTPLFLLFSVIYLVTMVGNLGLVALIYMEPRLHTPMYIFLGNLALMDSCCSCAITPKMLENFFSIDRRISLYECMAQFYFLCLAETSDCFLLAAMAYDRYVAICNPLQYHSMMSKKLSIQMSIGTFIASNLISILHVGCLLRLTFCKSNRIDHFFCDILPLYRLSCTDPFINELMIYIFSMPIQFLTITTVLVSYFCILLTIFKMKSKDGRGKALSTCASHFFSVSIFYACLLMYIRPFDDSNKDIPVAIFYTIIIPLLNPFIYSLRNTEVVNAVKKVMKIYTIFKRSSASA

SEQ ID NO: 679 - protein, 315 aa, Artificial Sequence
  Synthetic
MMKANHSLTVEFILIGFSDHTDLKTLLFLLFSAIYLVTIVGNLGLVALIYMEPRLHTPMYIFLGNLALMDSCCSCAITPKMLENFFSVDRRISLYECMVQFYFLCLAETADCFLLAAMAYDRYVAICNPLQYHTMMSKKLSIQMSIGTFIASNLHSLIHTGCLLRLNFCKSRRIDHFFCDILPLYKLSCTDPFINELMLYIFSMPIQVFTITTVLVSYSCILLTVFKMKSKDGRGKAFSTCASHFFSVSIFYICLLMYIGPSKNSNKDIPVGVFYTIVIPLLNPFIYSLRNKEVVNAVKKVMKTIFKNSSASIAH

SEQ ID NO: 680 - protein, 316 aa, Artificial Sequence
  Synthetic
MVEENHTMKNEFILTGFTDHPELKTLLFVVFFAIYLITVVGNISLVALIFTHCRLHTPMYIFLGNLALVDSCCACAITPKMLENFFSEGKRISLYECAVQFYFLCTVETADCFLLAAVAYDRYVAICNPLQYHIMMSKKLCIQMTTGAFIAGNLHSMIHVGLVFRLVFCGLNHINHFYCDTLPLYRLSCVDPFINELVLFIFSGSVQVFTIGSVLISYLYILLTIFRMKSKEGRAKAFSTCASHFSSVSLFYGSIFFLYIRPNLLEEGGNDIPAAILFTIVVPLLNPFIYSLRNKEVISVLRKILLKIKSQGSVNK

SEQ ID NO: 681 - protein, 316 aa, Artificial Sequence; identical to SEQ ID NO: 680
  Synthetic

SEQ ID NO: 682 - protein, 307 aa, Artificial Sequence
  Synthetic
MAEENHTMKNEFILTGFTDHPELKTLLFVVFFAIYLITVVGNISLVALIFTHRRLHTPMYIFLGNLALVDSCCACAITPKMLENFFSENKRISLYECAVQFYFLCTVETADCFLLAAMAYDRYVAICNPLQYHIMMSKKLCIQMTTGAFIAGNLHSMIHVGLVFRLVFCGSNHINHFYCDILPLYRLSCVDPYINELVLFIFSGSVQVFTIGSVLISYLYILLTIFKMKSKEGRAKAFSTCASHFLSVSLFYGSLFFMYVRPNLLEEGDKDIPAAILFTIVVPLLNPFIYSLRNREVISVLRKILMK

SEQ ID NO: 683 - protein, 319 aa, Artificial Sequence
  Synthetic
MVEENHTMKREFVLTGFTDHPEMKGLLFAVFFFIYLITMIGNMGLVILISKERSLHTPMYIFLGNLAFIDSCCACAITPKMLENFFSEDRIISLYECMAQFYFLCTVETADCFLLSAMAYDRYVAICNPLQYHTTMSKKLCLQMTTGAFIAGNLHSMVHVGLLFRLAFCGSNQINHFYCDILPLYRLSCVDPYINELVLFVFSGSIQVFTIGCVLISYLFIVYTIFQMKSKEGRIKAFSTCASHFLSVSLFYGSLFFMYIRPNLLEEGDKDMPAAILFTIVVPLLNPFIYSLRNKEVKNVLQKILQKKIISKNFKQASI

SEQ ID NO: 684 - protein, 317 aa, Artificial Sequence
  Synthetic
MATKNKTEVTEFVLLGLSSRPEIQPVIFGVVLIMYLMAVLGNTLLILVACSDPRLQTPMYFLLSQLSLIDISLTTITIPQMLVHTLSVNRSISYNRCMTQLFFFMAVGSMEVYLLGAMAYDRYVAICDPLRYSAIVSYSLCLQITLTSWMVVSLNSLLYSVLVTRLTFCGNKVTHFFCDITPLLKLSCTRPVLNEMLIFTEGVAVVGSPFFFIWGSYVRIGIAMAHMHSFAALKKALSTCSSHILVVLLLFGTLARMYLKPSSSYDLGQDRQVAIFYTLISPMLNPLIYSLRNQDVKGALWRLFRKLHTSDWLSDKE

SEQ ID NO: 685 - protein, 317 aa, Artificial Sequence; identical to SEQ ID NO: 684
  Synthetic

SEQ ID NO: 686 - protein, 318 aa, Artificial Sequence
  Synthetic
MATKNRTEVTEFVLLGLSSQPEMQPVIFGVVLIMYLMAVLGNTLLVLVACSDPKLHTPMYFLLSQLSLIDISLTTIIVPQMLVHTLSVNRTISYNCCMTQLFSFMTVGSMEVHLLGAMAYDRYVAICDPLRYSSIVSHSLCLRITLTSWVVVSLNSLLYSVLVTRLTFCGNKVTHFFCDITPLLKLSCTRPVVNEMLIFTEGVAVVVSPIFFIFGSYVRIGIVIAHMHSVAALQKALSTCSSHVLVVMFLFGSLVHMYLKPSSSYNLEQDRQVAIFYTLISPMLNPLIYSLRNQEVKGALWRLFRKLYLRQCPAWISH

SEQ ID NO: 687 - protein, 317 aa, Artificial Sequence
  Synthetic
MATKNKTEVTEFVLLGLSSRPEMQPVIFGVVLIMYLAAVLGNTLLVLVACSDPRLQTPMYFLLSQLSLIDICLTTITVPQMLVHTLSVVRSISYNCCMTQLFFFMAVGSMEGHLLAAMAYDRYVAICDPLRYSAIVSHSLCLRITLTSWVVVSLNSLLYSVLVTRLTFCGNQVTHFFCDITPLLKLSCTRPVVNEMLIFTEGVAVVVSPFFFILGSYIRIGFVIAHMHSTAALSKALSTCGSHIMVVLLLYGSVIRMYLKPSSTYDLNQDRQIAIFYTLVTPMLNPLIYSLRNQEVKGALTRLLRKLCISGSFQVGS

SEQ ID NO: 688 - protein, 306 aa, Artificial Sequence
  Synthetic
MLNTTSVTEFLLLGVTDIQELQPFLFVVFLTIYFISVTGNGAVLMIVISDPRLHSLMYFFLGNLSYLDICYSTVTLPKMLQNFLSTHKAISFLGCISQLHFFHFLGSTESMLFAVMAFDLSVAICKPLRYTVIMNPQLCTQMAITIWVIGFFHALLHSVMTSRLNFCGSNRIHHFLCDIKPLLKLACGNTELNQWLLSTVTGTIAMGPFFLTLLSYFYIITYLFKTRSCSMLCKALSTCASHFMVVILFYAPVLFTYIHPALESFMDQDRIVAIMYTVVTPVLNPLIYTLRNKEVKGALGRVIRRL

SEQ ID NO: 689 - protein, 306 aa, Artificial Sequence
  Synthetic
MLNTTSVTEFLLLGVTDIQELQPFLFVVFLTIYFISVTGNGAVLMIVISDPRLHSLMYFFLGNLSYLDICYSTVTLPKMLQNFLSTHKAISFLGCISQLHFFHSLGSTESMLFAVMAFDLSVAICKPLRYTVIMNPQLCTQMAITIWVIGFFHALLHSVMTSRLNFCGSNRIHHFLCDIKPLLKLACGNTELNQWLLSTVTGTIAMGPFFLTLLSYFYIITYLFKTRSCSMLCKALSTCASHFMVVILFYAPVLFTYIHPALESFMDQDRIVAIMYTVVTPVLNPLIYTLRNKEVKGALGRVIRRL

SEQ ID NO: 690 - protein, 304 aa, Artificial Sequence
  Synthetic
NTTSVTEFLLLGVTDIQELQPFLFVVFLTIYFISVTGNGAVLMIFISDPRLHSPMYFFLGNLSYLDICYSTVTLPKMLQNFLSTHKAISFLGCISQLHFFHFLGSTESMLLAVMAFDRSVAICKPLRYTVIMNPQLCTQMAITIWVIGFFHALLHSIMTSRLNFCGSNRIHHFLCDIKPLLKLACGNTELNQWLLSTVTGTIAMGPFFLTLLSYFYIITYLFKTRSCSMLCKALSTCASHFMVVILFYAPVLFTYIHPALESFMDQDRIVAIMYTVVTPVLNPLIYTLRNKEVKGALGRVIRRL

SEQ ID NO: 691 - protein, 307 aa, Artificial Sequence
  Synthetic
MSNQTSVTEFLLLGVTDIQELNPILFVVFFTIYFVNITGNGAILMIVILDPRLHSPMYFFLGNLACLDICFSTVTLPKMLQNLLSTSKAISFLGCITQLHFFHFLGSTEAMLLPVMAFDRFVAICRPLHYSVIMNHQLCIHMTVTIWTLGFFHALLHSVMTSRLSFCGPNHVHHFFCDIKPLLDLACGNTELNLWLLNTVTGTIALTPFFLTFLSYFYIITYLLKTRSCSMLHKALSTCASHFMVVILLYVPVLFTYIRPASGSSLDQDRIIAIMYSVVTPALNPLIYTLRNKEVRSALNRKVRRWL

SEQ ID NO: 692 - protein, 315 aa, Artificial Sequence
  Synthetic
MENVTTMNEFLLLGLTGVQELQPFFFGIFLIIYLINLIGNGSILVMVVLEPQLHSPMYFFLGNLSCLDISYSSVTLPKLLVNLVCSRRAISFLGCITQLHFFHFLGSTEAILLAIMAFDRFVAICNPLRYTVIMNPQVCILLAAAAWLISFFYALMHSVMTAHLSFCGSQKLNHFFYDVKPLLELACSDTLLNQWLLSIVTGSISMGAFFLTLLSCFYVIGFLFKNRSCRILHKALSTCASHFMVVCLFYGPVGFTYIRPASATSMIQDRIMAIMYSAVTPVLNPLIYTLRNKEVMMALKKIFGRKLFKDWQQHH

SEQ ID NO: 693 - protein, 311 aa, Artificial Sequence
  Synthetic
MENSTSVDEFLLLGLTSVQKLQPIIFVMFLTIYLLNLVGNGVILMIVTLERRLHSPMYFFLGNLSCLDICYSSVTLPKVLINLLSRRRAISFLGCITQLYFFHFLGSTEAILLAVMAFDRFVAICSPLRYTAIMNPQLCILLAATAWFTSFFYALLHSVMTAHLNFCHSHKLSHFFCDVKPLLEVACGNTVLNQWLLSVVTGSISMGAFLLILLSYFYIIAFLFKNRSCRMLKKALSTCTSHFMVVCLFYGPVGFTYIRPASASSMSEDRVVAIIYSAVTPVLNPLIYTLRNKEVMLALKKNFGKKLFKGN

SEQ ID NO: 694 - protein, 311 aa, Artificial Sequence; identical to SEQ ID NO: 693
  Synthetic

SEQ ID NO: 695 - protein, 319 aa, Artificial Sequence
  Synthetic
MERKNQTAITEFIILGFSNLNELQFLLFTIFFLTYFCTLGGNILIILTTVTDPHLHTPMYYFLGNLAFIDICYTTSNVPQMMVHLLSKKKSISYVGCVVQLFAFVFFVGSECLLLAAMAYDRYIAICNPLRYSVILSKVLCNQLAASCWAAGFLNSVVHTVLTFCLPFCGNNQINYFFCDIPPLLILSCGNTSVNELALLSTGVFIGWTPFLCIVLSYICIISTILRIQSSEGRRKAFSTCASHLAIVFLFYGSAIFTYVRPISTYSLKKDRLVSVLYSVVTPMLNPIIYTLRNKDIKEAVKTIGSKWQPPISSLDSKL

SEQ ID NO: 696 - protein, 319 aa, Artificial Sequence; identical to SEQ ID NO: 695
  Synthetic

SEQ ID NO: 697 - protein, 317 aa, Artificial Sequence
  Synthetic
MEGKNQTAPSEFIILGFDHLNELQYLLFTIFFLTYICTLGGNVFIIVVTIADSHLHTPMYYFLGNLALIDICYTTTNVPQMMVHLLSEKKIISYGGCVTQLFAFIFFVGSECLLLAAMAYDRYIAICKPLRYSFIMNKALCSWLAASCWTGGFLNSVLHTVLTFHLPFCGNNQINYFFCDIPPLLILSCGDTSLNELALLSIGILIGWTPFLCIILSYLYIISTILRIRSSEGRHKAFSTCASHLLIVILYYGSAIFTYVRPISSYSLEKDRLISVLYSVVTPMLNPVIYTLRNKDIKEAMKAIGRKWKPPVFSSDI

SEQ ID NO: 698 - protein, 314 aa, Artificial Sequence
  Synthetic
MEGKNQTAPSEFIILGFDHLNELQYLLFTIFFLTYICTLGGNVFIIVVTIADSHLHTPMYYFLGNLALIDICYTTTNVPQMMVHLLSEKKIISYGGCVTQLFAFIFFVGSECLLLAAMAYDRYIAICKPLRYSFIMNKALCSWLAASCWTGGFLNSVLHTVLTFHLPFCGNNQINYFFCDIPPLLILSCGDTSLNELALLSIGILIGWTPFLCVILSYLYIISTILRIRSSEGRHKAFSTCASHLLIVILYYGSAIFTYVRPISSYSLEKDRLISVLYSVVTPMLNPVIYTLRNKDIKEAIGRKWQPPVFSSDI

SEQ ID NO: 699 - protein, 320 aa, Artificial Sequence
  Synthetic
MTPFEMTNHTRVTEFIFLGFSNHPNLQGVFFLAFLAIYLTTLLGNTLMIVATRVSPALHTPMYYFLSNLSFLDICYTSTSIPVMLVNFFREKKTISFEGCLSQIFFFVSCAGTECVLLAAMAYDRYVAVCHPLRYPVLMSTRVCISLVTGSWLCGLVNSVTHTVLTSTLTLCGPNQISHFLCDVPLLLKLSCSDTSVNESVLHVSSATVGLSPCLFTAGSYILIISAILRIPSTQGKRKAFSTCASHLTVVVVFFGTANFNYVRPKEGYSLDMGILVSVLYCVVTPLFNPIIYSLRNKEVKGALRKLTGVPSLTIAVARE

SEQ ID NO: 700 - protein, 320 aa, Artificial Sequence; identical to SEQ ID NO: 699
  Synthetic

SEQ ID NO: 701 - protein, 315 aa, Artificial Sequence
  Synthetic
MDVYNLTTVTQFILIGLSDLPEVRYPLFVAFVIIYQITLLGNGLILLAIVTEKKLQTPMYYLLANLSLLDIFCPSATVPKMLKNLLTEDHSISFVGCALQLYFLVALAGTEVFLLAVMAYDRYVAICFPLRYSLIMTKVRCVQLLFGTWAAGFLNSFVHTMSTFSLSFCKSNRVNQYYCDIPPVVALSCSSTYMAEMLVLVIGGICGVGAFLITLISYIYIVSTILKIRSAEGKRKAFSTCASHLLVVFLFYGTTIFTYIRPTSSQHSPGRDRLISMLYGVITPMLNPIIYSLRNTEVKGALRKVLHLRICSQRE

SEQ ID NO: 702 - protein, 315 aa, Artificial Sequence
  Synthetic
MDVYNLTTVTQFILIGLSDLPEVRYPLFVAFVIIYQITLLGNGLILLAIVTEKKLQTPMYYLLANLSLLDIFCPSATVPKMLKNLLTEDHSISFVGCALQLYFLVALAGTEVFLLAVMAYDRYVAICFPLRYSLIMTKVRCVQLLFGTWAAGFLNSFVHTMSTFSLSFCNSNRVNQYYCDIPPVVALSCSSTYMAEMLVLVIGGICGVGAFLITLISYIYIVSTILKIRSAEGKRKAFSTCASHLLVVFLFYGTTIFTYIRPTSSQHSPGRDRLISMLYGVITPMLNPIIYSLRNTEVKGALRKVLHLRICSQRE

SEQ ID NO: 703 - protein, 317 aa, Artificial Sequence
  Synthetic
MEMDVYNLTTVTQFILIGLSDLPEVRYPLFVAFVIIYQITLLGNGLILLAIVTEKKLQTPMYYLLANLSLLDIFCPSATVPKMLKNLLTEDHSISFVGCALQLYFLVALAGTEVFLLAVMAYDRYVAICFPLRYSLIMTKVRCVQLLFGTWAAGFLNSFVHTMSTFSLSFCKSNRVNQYYCDIPPVVALSCSSTYMAEVLLLVIASIFGVGAFLITLISYIYIVSTILKIRSAEGKRKAFSTCASHLLVVFLFYGTTIFTYMRPTSSQHSPGRDRLISMLYGVITPMLNPIIYSLRNTEVKGALRKVLHLRICSQTA

SEQ ID NO: 704 - protein, 308 aa, Artificial Sequence
  Synthetic
MSNQTLVTEFILQGFSEHPEYRVFLFSCFLFLYSGALTGNVLITLAITFNPGLHAPMYFFLLNLATMDIICTSSIMPKALASLVSEESSISYGGCMAQLYFLTWAASSELLLLTVMAYDRYAAICHPLHYSSMMSKVFCSGLATAVWLLCAVNTAIHTGLMLRLDFCGPNVIIHFFCEVPPLLLLSCSSTYVNGVMIVLADAFYGIVNFLMTIASYGFIVSSILKVKTAWGRQKAFSTCSSHLTVVCMYYTAVFYAYISPVSGYSAGKSKLAGLLYTVLSPTLNPLIYTLRNKEVKAALRKLFPFFRN

SEQ ID NO: 705 - protein, 314 aa, Artificial Sequence
  Synthetic
RPSPRMMSNQTLVTEFILQGFSEHPEYRVFLFSCFLFLYSGALTGNVLITLAITFNPGLHAPMYFFLLNLATMDIICTSSIMPKALASLVSEESSISYGGCMAQLYFLTWAASSELLLLTVMAYDRYAAICHPLHYSSMMSKVFCSGLATAVWLLCAVNTAIHTGLMLRLDFCGPNVIIHFFCEVPPLLLLSCSSTYVNGVMIVLADAFYGIVNFLMTIASYGFIVSSILKVKTAWGRQKAFSTCSSHLTVVCMYYTAVFYAYISPVSGYSAGKSKLAGLLYTVLSPTLNPLIYTLRNKEVKAALRKLFPFFRN

SEQ ID NO: 706 - protein, 309 aa, Artificial Sequence
  Synthetic
MMRNQTLVTEFILQGFSEHPQYQLPLFFCFLSLYCVALTGNVLIILAITCNPGLHTPMYFFLFNLATMDIICTSSIMPKALRGLVSKRNPISYGGCMAQLYFLTWSASSELLLLTVMAYDRYAAICHPLHYSTMMSKAFCSMLAAGVWALCAFNTAIHTGLMTRLSFCGPNVITHFFCEVPPLLLLSCSSTYVNSVMIVLADAFYGILNFLMTIVSYGFIISSILKMRTSEGKQKAFSTCSSHLIVVCMYYTAVFYAYISPVSSYNAEKSKLAGVLYTMLSPTLNPLIYTLRNKEVKAALRKFFPFLRN

SEQ ID NO: 707 - protein, 311 aa, Artificial Sequence
  Synthetic
MMLRLNQTEVTEFVLEGFSEHPDLRLFLIGCFLTLYIMALMGNILIIALVTSSTGLHNPMYFFLCNLATTDILCTSSVIPKALVGLVSEENTISFKECMSQLFFLAWSASSELLLLTVMAYDRYVAICCPLHYSSRMSPQMCGALAMGVWSISAVNASVHTGLMTRLSFCGPKVITHFFCEIPPLLLLSCSPTYVNTIMTLLGDSFFGGVNFVLTLLSYGCIIASILRMRSAEGKRKAFSTCSSHLIVVSVYYSSVFCAYVSPASSYSPERSKVTSVLYSIVSPTLNPLIYTLRNKDVKLALGRILASFSH

SEQ ID NO: 708 - protein, 314 aa, Artificial Sequence
  Synthetic
LSMMMLNLNQTEVTEFVLEGFSEHPGLRLFLTGCFLSLYMMALMGNILIIALVTFSTGLHNPMYFFLCNLATMDIICTSSVIPKALVGLVSEENTISFKGCMSQLFFLTWSASSELLLLTVMAYDRYVAICFPLHYSSRMSPQLCGALAMVVWFIGLVNACVHTGLMTRLSFCGPKVITHFFCEIPPLLLLSCSPTYVNSILTLVADAFFVGINFMLTLLSYGCIIASILRMRSAEGKRKAFSTCSSHLIVVSVYYSSMFCAYISPASSYSPERSKVTSVLYSILSPTLNPLIYTLRNKDVKLALGRILASFSH

SEQ ID NO: 709 - protein, 312 aa, Artificial Sequence
  Synthetic
MMLLSLNQTGVTEFVLEGFSEHPGLRLFLTGCFLTLYMMALMGNIVIIALVTSSTGLHNPMYFFLCNLATTDIVCTSSVIPKALIGLVSEENIITFKGCMAQLFFLAWATSAELLLLTVMAYDRYVAICFPLHYSSRMSPQLCGALAVGVWSISAVNASVHTGLMTRLSFCGPKVITHFFCEIPPLLLLSCSSTYINSVMTLVADVFLGGINFMLTLLSYGFIIASILRMRSAEGKRKAFSTCSSHLIVVSVYYSSVFCAYISPASSYSPERSKFTSVLYSVVSPTLNPLIYTLRNKDVKLALGRMLASFSH

SEQ ID NO: 710 - protein, 312 aa, Artificial Sequence
  Synthetic
MMMLRLNQTEVTEFVLEGFSEHPDLRLFLIGCFLSLYMMALMGNIVIIALVTSSTGLHSPMYFFLCNLATMDIVCTSSVIPKALVGLVSGENTISFKGCMAQLFFLVWSASSELLLLTVMAYDRYVAICFPLHYSSRMSPQLCGALAVGVWSICALNASVHTGLMTRLSFCGPKIITHFFCEIPPLLLLSCSPTYINSVMTLVADAFYGGINFVLTLLSYGYIIGSILRMRSAEGKRKAFSTCSSHLIVVSVYYSSVFCAYVSPASSYSPERSKVSSVLYSVLSPTLNPLIYTLRNKDVKLALGRILPSFSH

SEQ ID NO: 711 - protein, 310 aa, Artificial Sequence
  Synthetic
MTMLSPNQTVVTEFVLEGFSEHPSLRLFLMGCFLSLYTVALMGNILIIALVTSSTGLHSPMYFFLCNLATMDIVCTSSVIPKALIGLVFEENTISFKGCMAQLFFLVWSASSELLLLTVMAYDRYVAICYPLHYSSRMSPQLCGVLAMSVWSVCALNASINTGLMTRLSFCGPKVITHFFCEIPPLLLLSCSPTYVNSVMTLVADAFYGGINFMLTLLSYGYIIASILRMRSAEGRRKAFSTCSSHLIVVSVYYSSVFCAYVSPASSYSPERSKVSSVLYSVLSPTLNPLIYTLRNKDVKLALGRRLPSH

SEQ ID NO: 712 - protein, 311 aa, Artificial Sequence
  Synthetic
MMSRLNQTVVTEFILQGFSEHPSLRLFLTGCFLSLYVMALMGNILIIALVTFSTGLHSPMYFFLCNLATMDIICTSSVLPKALVGLLSEENTISFKGCMAQLFFLVWSLSSELLLLTVMAYDRYVAICFPLHYSSRMSPQLCGALAMGVWSICALNASINTGLMTRLSFCGPKVITHFFCEIPPLLLLSCSPTYVNSIMTLIADVFYGGINFVLTLLSYGCIIASILRMRSAEGKRKAFSTCSSHLIVVSVYYSSVFCAYVSPASSYSPERSKVTSVLYSFLSPTLNPLIYTLRNKDVKLAIGRLLPSFSH

SEQ ID NO: 713 - protein, 311 aa, Artificial Sequence
  Synthetic
MMFSPNQTEVTEFILEGFSEHATLRLLLTGCFLSLYTIALMGNIVIIALVTSSTGLHSPMYFFLCNLATMDIVCTSSVIPKALIGLVSEENTISFKGCMAQLFFLLWSLSSELLLLTVMAYDRYVAICFPLHYSSRMSPQLCGALAVGVWSICAVNASVHTGLMTRLSFCGPKVITHFFCEIPPLLLLSCSPTYINSVMTLVADAFYGCINFVLTLLSYGCIIASVLRMRSAEGKRKAFSTCSSHLIVVSVYYSSVFCAYVSPASSYSPERSKVTSVLYSILSPTLNPLIYTLRNKDVKLALGRLLPFFPK

SEQ ID NO: 714 - protein, 311 aa, Artificial Sequence; identical to SEQ ID NO: 713
  Synthetic

SEQ ID NO: 715 - protein, 314 aa, Artificial Sequence
  Synthetic
LHSTMVSPNQTVVTEFVLQGFSEHPSLRLFLMGCFLSLYTVALMGNMVIIALITSSTGLHSPMYFFLCNLATMDIICTSSVLPKALVGLLSEENTISFKGCMTQLFFLVWSGSSELLLLTVMAYDRYVAICLPLHYSSRMSPQLCGTFAVGVWSICALNASINTGLMTRLSFCGPKVITHFFCEIPPLLLLSCSPTYINSVMTLVADAFYGGINFLLTLLSYGCIIASILRMRSAEGKRKAFSTCSSHLIVVSVYYSSVFCAYISPGSSYSPERSKFTSVLYSVLSPTLNPLIYTLRNKDVKLALRRLFPSFSN

SEQ ID NO: 716 - protein, 314 aa, Artificial Sequence
  Synthetic
LHTTMVSPNQTVVTEFVLQGFSEHPSLRLFLMGCFLSLYTVALMGNMVIIALITSSTGLHSPMYFFLCNLATMDIICTSSVLPKALVGLLYEENTISFKGCMAQLFFLLWSGSSEVLLLTVMAYDRYVAICCPLSYSSRMSPQLCAALAVAVWSICAVNASVHTGLMTQLSFCGPKVITHFFCEIPPLLLLSCSPTYVNSVMTLVADAFYGGINFLLTLLSYGCIIASILHMRSAEGKRKAFSTCSSHLIVVSVYYSSLFCAYISPASSYSPERSKFTSFFYSVLSPTLNPLIYTLRNKDVKLALRRLLPSLSN

SEQ ID NO: 717 - protein, 309 aa, Artificial Sequence
  Synthetic
MAINNSTTVVEFVLQGLSEDPGLQALFLAFFLLLYILALAGNTLIIIAISLNPRLHTPMYFFLANLALLDIICTSTVVPKLLEGLVGKSSHISYKGCMTQVFFLIWVLGAELLLLTAMAYDRYVAICRPLHYNTLMSWPICVLLAGFVWVIGIANTSVHIGLLVRLNFCGSNQIRHFLCEVPTLLLLSCSPTTLNNIMLVIADVYFGVLNFLLTMISYSFIISSILRIRSAEGKKRAFSTCSAHLVVVTLYYSTIIYTYLQPGSGSSFQNSKVVTLLYTAVSPTLNPIIYSLRNKDVKVALKRLFPCFH

SEQ ID NO: 718 - protein, 309 aa, Artificial Sequence; identical to SEQ ID NO: 717
  Synthetic

SEQ ID NO: 719 - protein, 309 aa, Artificial Sequence
  Synthetic
MEINNYTTVVEFVLQGLSEDPGLQALFLAFFLLLYILALAGNTLIIIAISLNSSLHTPMYFFLANLALLDIVCTSTVLPKLLEGLVGKSSHISYKGCMTQLFFLTWFLGAELLLLTAMAYDRYVAICRPLHYSMLMSWPICVLLAGSVWVISAASTSVHTGLMARLNFCGPNQIRHFLCEVPTLLLLSCSPTTLNNIMIVIADVYFGVVNFLLTMISYSFIITSILRIRSTEGKKRAFSTCSAHLVVVVLYYSTVIYTYLQPGSGSSLENGKVVALLYTAVSPTLNPAIYSLRNKDVKVALKKLFPCFQ

SEQ ID NO: 720 - protein, 302 aa, Artificial Sequence
  Synthetic
NGTLVTEFLILGFSDMPHLRILLFLSFLCLYMAAVSGNLLIMVTISASPTLHTPMYFFLVNLAVVDILCTSTILPKLLDTMVGGRTISYGGCMAQLFFFTWSLGVELLLFSAMAYDRFVAICCPLHYSTWMGPRVCAFLAGIVWAISLTNTSINSSLVLRLPFCSSNVVEHFFCEIPPLLKLSCAPTQLNEAMAFAADVFLAVGNFSVIILSYGFIVASILKIRSAEGKQRAFSTCSAHLIVVTMYYSTVIYTYIRPSSSYSLNKDKVVSIIYTSVAPTLNPLIYTLRNKDVKVALRRLFSC

SEQ ID NO: 721 - protein, 304 aa, Artificial Sequence
  Synthetic
MMNGTLVTEFLILGFSEMPHLRVPLLFSFLCLYMAAISGNLLIMVTISASPALHTPMYFFLVNLAIVDILCTSTILPKLLDSMMTGRTISYGGCMAQLFFFTWSLGAELLLFSAMAYDRFVAICCPLHYSAWMGPRVCAFLAGIVWTISLTNTSVHTGLMLRLPFCSSNVIEHFFCEIPPLLKLSCAPTQLNEAMAFAADVFLAVGNFSVTILSYGFIVASILKIRSAEGKRRAFSTCSAHLIVVTMYYSTVIYTYIRPSSSYSLNKDKVVSIIYTSVAPTLNPLIYTLRNKDVKVALRRLLSC

SEQ ID NO: 722 - protein, 306 aa, Artificial Sequence
  Synthetic
MALVNQSVVTMFILQRFVDDPWIQDVLFCLFFALFMAAIAGNGLIIATIHSSPNLHTPMYFFLVNLSLMDVICTVTVLPKVLQSLVAENSISYGGCLTQMFVFSWVLGSELLLFSAMAYDRYLAICRPLHYGTLMSGKVCVALATFVWFTGALNSLVLTCLMLPLSFCGPNLITHFFCEIPSVLILSCSPTFINDIMTVITDMFLTGLNFLLTMTSYVFIIASILRIRSAEGKKRAFSTCSAHLVVVTLYYSTVLYTYVRPALGTAGFLDKLIAVLYTTVTPSLNPLIYTLRNKEFKISFKKLLFP

SEQ ID NO: 723 - protein, 318 aa, Artificial Sequence
  Synthetic
MAPVNQSVVTMFILQRFVDDPRVQDVLFCLFFALFVAAIAGNGLIIATIHSSPNLHTPMYFFLVNLALMDVICTVTVLPKVLQSLVAENSISYGGCLTQMFVFSWVLGSELLLFSAMAYDRYLAICRPLHYGTLMSGRVCVALATFVWFTGAFNSLVLTCLMLPLSFCGPNLITHFFCEIPSVLILSCSPTFINDIMTVIADMFLTGLNFLLTMTSYGFIISSILRIRSAEGKKRAFSTCSAHLVVVTLYYSTVLYTYVRPALGTAGFLDKLIAVLYTTVTPSLNPLIYTLRNKEFKTSFKKLISLTLSLEMNSKSNG

SEQ ID NO: 724 - protein, 306 aa, Artificial Sequence
  Synthetic
MAPVNQSAITMFILQNFVDDPWIQDVLFCLLFALFMAAIAGNGLIIATIHSSPNLHTPMYFFLVNLALMDMICTVTVLPKVLQSLVAENSISYGGCLIQMFVFSWVLGSELLLFSAMAYDRYLAICRPLHYGTLMSGRVCVALATFVWFIGALNSLVLTCLVLPLSFCGSNLIAHFFCEIPSVLILSCSPTFINNVMTVIADMFLTGLNFLLTMTSYVFIISSILRIRSAEGKKRAFSTCSAHLVVVTLYYSTALYTYVRPALGTAGLLDKVIAIPYTTVTPSLNPLIYTLRNKEFKTSFKKLLFP

SEQ ID NO: 725 - protein, 307 aa, Artificial Sequence
  Synthetic
MNHSVVTEFIILGLTKKPELQGIIFLFFLIVYLVAFLGNMLIIIAKIYNNTLHTPMYVFLLTLAVVDIICTTSIIPKMLGTMLTSENTISYAGCMSQLFLFTWSLGAEMVLFTTMAYDRYVAICFPLHYSTVMNHHMCVALLSMVMAIAVTNSWVHTALIMRLTFCGPNTIDHFFCEIPPLLALSCSPVRINEVMVYVADITLAIGDFILTCISYGFIIVAILRIRTVEGKRKAFSTCSSHLTVVTLYYSPVIYTYIRPASSYTFERDKVVAALYTLVTPTLNPMVYSFQNREMQAGIRKVFAFLKH

SEQ ID NO: 726 - protein, 308 aa, Artificial Sequence
  Synthetic
MMNFSIVSEFMILGLTQKSELQGILFIVFLFIYLVALLGNMLIVVAIIYNTTLHTPMYILLLALAVVDIICTTSIIPKMLGTMLTSKNSISYGGCMSQLFFFTWSLGAEMVLFTTMAYDRYVAICFPLRYSTIMNHYTCVGLLSIVMAIAVTNSWVHTGLILRLTFCGPNIIDHFFCEIPPLLALSCSPVRVNEVMVYVADITLAVGDFTLTCISYGFIIAAILRIRTTEGKKKAFSTCSSHLMVVSLYYSPVIYTYIRPASSYTFDKDKVVAALYTLVTPTLNPIVYSFRNKEMQSGIKKVFAFLKG

SEQ ID NO: 727 - protein, 315 aa, Artificial Sequence
  Synthetic
MEPEAGTNRTAVAEFILLGLVQTEEMQPVVFVLLLFAYLVTTGGNLSILAAVLVEPKLHAPMYFFLGNLSVLDVGCITVTVPAMLGRLLSHKSTISYDACLSQLFFFHLLAGMDCFLLTAMAYDRLLAICQPLTYSTRMSQTVQRMLVAASWACAFTNALTHTVAMSTLNFCGPNEVNHFYCDLPQLFQLSCSSTQLNELLLFVAAAFMAVAPLVFISVSYAHVVAAVLQIRSAEGRKKAFSTCGSHLTVVGIFYGTGVFSYMRLGSVESSDKDKGVGVFMTVINPMLNPLIYSLRNTDVQGALCQLLVGKRSLT

SEQ ID NO: 728 - protein, 315 aa, Artificial Sequence
  Synthetic
MEPEAGTNRTAVAEFILLGLVQTEEMQPVVFVLLLFAYLVTTGGNLSILAAVLVEPKLHAPMYFFLGNLSVLDVGCITVTVPAMLGRLLSHKSTISYDACLSQLFFFHLLAGMDCFLLTAMAYDRLLAICQPLTYSTRMSQTVQRMLVAASLACAFTNALTHTVAMSTLNFCGPNEVNHFYCDLPQLFQLSCSSTQLNELLLFAVGFIMAGTPLVLIITAYSHVAAAVLRIRSVEGRKKAFSTCGSHLTVVCLFFGRGIFNYMRLGSEEASDKDKGVGVFNTVINPMLNPLIYSLRNPDVQGALWQIFLGRRSLT

SEQ ID NO: 729 - protein, 312 aa, Artificial Sequence
  Synthetic
MSLQNRTAVAEFILLGLVQTEEMQPVVFVLLLFAYLVTTGGNLSILAAVLVEPKLHAPMYFFLGNLSVLDVGCITVTVPAMLGRLLSHKSTISYDACLSQLFFFHLLAGMDCFLLTAMAYDRLLAICQPLTYSTRMSQTVQRMLVAASLACAFTNALTHTVAMSTLNFCGPNEVNHFYCDLPQLFQLSCSSTQLNELLLFAVGFIMAGTPLVLIITAYSHVAAAVLRIRSVEGRKKAFSTCGSHLTVVCLFFGRGIFNYMRLGSEEASDKDKGVGVFNTVINPMLNPLIYSLRNPDVQGALWQIFLGRRSLT

SEQ ID NO: 730 - protein, 315 aa, Artificial Sequence
  Synthetic
MQTKPRINGTTITEFILLGLVETPELWPLVFILFLLAYMTTVGGNLSILAAVLVEPKLHTPMYFFLGNLSVMDVGCISVTIPSMLVRLLVQKHTIPYGDCLTQLFFFHLLAGVDCFLLTAMAYDRFLAICQPLTYSTRMNYTIQRILVAMSWACAFSNALTHTVAISTLHFCGPNVINHFYCDLPQLFQLSCSSTQLNELLLFGVGFIMAGTPMALIFISYIHVAAAVLRIRSAEGRKKAFSTCSSHLTVVAMFYGTGMFNYMRLGSTKFSDKDKAIGIFNTVINPMLNPLIYSLRNPDVQAALWRVLTGRRPAA

SEQ ID NO: 731 - protein, 315 aa, Artificial Sequence
  Synthetic
MQPKPRANGTTITEFILLGLVETPELWPLVFILFLLAYMTTVGGNLSILAAVLVEPKLHTPMYFFLGNLSVMDVGCISVTIPSMLVRLLVHKRTIPYGDCLTQLFFFHLLVGVDCFLLTAMAYDRFLAICRPLTYSTRMNHTIQRILVATSWACAFSNALTHTVAISTLHFCGPNVINHFYCDLPQLFQLSCSSTQLNELLLFGVGFIMAGTPMALIFTSYMHVAAAVLRIRSAEGRKKAFSTCSSHLTVVAIFYGAGIFNYMRLGSTKLSDKDKAIGIFNTVINPMLNPLIYSLRNPDVQAALWRVLTGRRPAA

SEQ ID NO: 732 - protein, 315 aa, Artificial Sequence
  Synthetic
MQPKPRANGTTVTEFILLGLVETPELWPLVFILFLLAYMTTVGGNLSILAAVLVEPKLHTHMYFFLGNLSVMDVGCISVTIPSMLGRLLAHRLTVPYGACLTQLFFFHLLAGVDCFLLTAMAYDRFLAICQPLTYSTRMNHSVQRILVASSWACSFSNALTHTVATSTLRFCGPNVIDNFYCDLPQLFQLSCSSTQINELLLFALSFIMAGTPMALIFTSYINVAAAVLRIRSAEGRKKAFSTCSSHLTVVAMFYGTGMFNYMRLGSTKLSDKDKAIGIFNTVINPMLNPLIYSLRNPDVQAALWRVLTGRRPAA

SEQ ID NO: 733 - protein, 315 aa, Artificial Sequence
  Synthetic
MQPESGANGTVIAEFILLGLLEAPGLQPVVFVLFLFAYLVTVRGNLSILAAVLVEPKLHTPMYFFLGNLSVLDVGCISVTVPSMLSRLLSRKRAVPCGACLTQLFFFHLFVGVDCFLLTAMAYDRFLAICRPLTYSTRMSQTVQRMLVAASWACAFTNALTHTVAMSTLNFCGPNVINHFYCDLPQLFQLSCSSTQLNELLLFAVGFIMAGTPMALIVISYIHVAAAVLRIRSVEGRKKAFSTCGSHLTVVAIFYGSGIFNYMRLGSTKLSDKDKAVGIFNTVINPMLNPIIYSFRNPDVQSAIWRMLTGRRSLA

SEQ ID NO: 734 - protein, 315 aa, Artificial Sequence
  Synthetic
MQPESGANGTVIAEFILLGLLEAPGLQPVVFVLFLFAYLVTVRGNLSILAAVLVEPKLHTPMYFFLGNLSVLDVGCISVTVPSMLSRLLSRKRAVPCGACLTQLFFFHLFVGVDCFLLTAMAYDRFLAICRPLTYSTRMSQTVQRMLVAASWACAFTNALTHTVAMSTLNFCGPNVINHFYCDLPQLFQLSCSSTQLNELLLFAVGFIMAGTPMALIVISYIHVAAAVLRIRSVEGRKKAFSTCGSHLTVVAIFYGSGIFNYMRLGSTKLSDKDKAVGIFNTVINPMLNPIIYSFRNPDVQSAIWRMLTGRRSRL

SEQ ID NO: 735 - protein, 315 aa, Artificial Sequence
  Synthetic
MESKFESNGTAVTEFILLGLVETAGLQPVIFVVFLFAYLLTVGGNLSILAAVFVEPKLHTPMYFFLGNLSMLDVGCISVTVPSMLGRLLSHKRTVPYGACLTQLFFFHQLAGVDCFLLTAMAYDRFLAICRPLTYSTRMNHTVQRILVATSWACAFSNALTHTVAISTLNFCGPNVINHFYCDLPQLFQLSCSSTQLNELLLFGLGVLMAGAPVILIVTSYIHVAAAVLRIQSSEGRKKAFSTCSSHLTVVGIFYGTGVFSYMRLGSVEASDKDKGIGILNTVISPMLNPLIYSLRNPDVQGALRRVLTGKRDLA

SEQ ID NO: 736 - protein, 315 aa, Artificial Sequence
  Synthetic
MEPGAWGNRTAVTDFILLGLTGNVRLQPILFVVFFFAYIVTVGGNLSILAAIFVEPKLHTPMYYFLGNLSLLDIGCISVTVPPMLVCLLAHECRVPYAACISQLFFFHLLAGVDCHLLTAMAYDRYLAICQPLTYSTRMSREVQGTLVGICCTVSFINALTHTVAVSVLDFCGPNVVNHFYCDLPPLFQLSCSSIYLNGQLLFVGATFMGVVPMILISVSYAHVAAAVLRIRSTEGRKKAFSTCGSHLTVVCIFYGTGFFSYMRLGSVSASDKDKGIGILNTILSPMLNPLIYSLRNPDVQGALKRVLTGKRYPV

SEQ ID NO: 737 - protein, 319 aa, Artificial Sequence
  Synthetic
MDLGNSGNDSVVTKFVLLGLTETAALQPILFVIFLLAYVTTIGGTLSILAAILMETKLHSPMYFFLGNLSLPDVGCVSVTVPAMLSHFISNDRSIPYKACLSELFFFHLLAGADCFLLTIMAYDRYLAICQSLTYSSRMSWGIQQALVGMSCVFSFTNALTQTVALSPLNFCGPNVINHFYCDLPQPFQLSCSSVHLNGQLLFVAAAFMGVAPLVLITVSYAHVAAAVLRIRSAEGRKKAFSTCSSHLTVVGIFYGTGVFSYTRLGSVESSDKDKGIGILNTVISPMLNPLIYCISHPPVQSCLQFGWGGLSPLNSHGL

SEQ ID NO: 738 - protein, 310 aa, Artificial Sequence
  Synthetic
MDLGTLGNDSCVSTFVLLGLTETPVLRPILFVIFLLAYVATLGGNFSILAAIIIEPKLHTPMYFFLGNLSMLDVGCISVTVPAMLKHFLSNDRHIPYGACLSQLFFFHLLAGADCFLLTVMAYDRYLAICHPLTYNTHMSWRIQKASVCLSCVFSFSNALTQTVALSTLKFCGPNTINHFYCDLPQLFQLSCSSIQLNEQLLFVAAAFMGVVPLVLITVSYGHVAAAVLRIRSAEGRKKAFSTCSSHLTVVGIFYGTGVFSYMRLGSVESSDKDKGIGILNTVISPMLNPLIYSLRNPDVQGALWKVLGR

SEQ ID NO: 739 - protein, 311 aa, Artificial Sequence
  Synthetic
MDLGTLGNDSCVSTFVLLGLTETPVLRPILFVIFLLAYVATLGGNFSILAAIIIEPKLHTPMYFFLGNLSMLDVGCISVTVPAMLKHFLSNDRHIPYGACLSQLFFFHLLAGADCFLLTVMAYDRYLAICHPLTYNTHMSWRIQKASVCLSCVFSFSNALTQTVALSTLKFCGPNTINHFYCDLPQLFQLSCSSIQLNEQLLFVAAAFMGVVPLVLITVSYGHVAAAVLRIRSAEGRKKAFSTCSSHLTVVGIFYGTGVFSYMRLGSVESSDKDKGIGILNTVISPMLNPLIYSLRNPDVQGALRKVLTGR

SEQ ID NO: 740 - protein, 315 aa, Artificial Sequence
  Synthetic
MQGSSYENHSSVSEFILLGFSSNFQLNIILFNVFFFLYLSTLVGNGLIVTLIHLDSRLHTPMYFFLSVLSMLDMSYVTTTVPQMLVHLLCQKKTISYSGCVAQMYIFLVLGITEGWLFSVMAYDRYVAICHPLRYKVIMRPWLCGAMVVFCGLWGVSCSLIYTVFTMRLPYCGPNEINHFFCEVPAVLKLACADTSLNDRIDFILGFILLLVPLSFILASYVCIFATILRIRSAQGRLKAFSTCASHITVVTMFCGPAMFMYMNPGANASPERDKKLALFYNVISAFLNPIIYSLRNKDVKRAFLKVTGWGGATE

SEQ ID NO: 741 - protein, 315 aa, Artificial Sequence
  Synthetic
MQDFLWRNRSSLTEFVLLGFSSNTQINGILFGIFLLLYLTTLLGNGLIITLIHMDSRLHTPMYFFLSVLSILDMGYVTTTVPQMLVHLVCKKKTISYVGCVAQMYIFLMLGITESWLFAIMAYDRYVAICHPLRYKVIMSPLLRGSLVAFCGFWGITCALIYTVSAMILPYCGPNEINHFFCEVPAVLKLACADTSLNDQVDFILGFILLLVPLSLIIVVYINIFAAILRIRSTQGRIKAFSTCVSHIIVVTMFSIPCMVMYMRPGSESSPEEDKKLALFYNVISAFLNPIIYSLRNKDVKRAFLKVVGSRKGSE

SEQ ID NO: 742 - protein, 315 aa, Artificial Sequence
  Synthetic
MHSRGWRNHSSVTEFILLGFSRNPRTNWILFFLFLFLYLFTVLGNGLIVTLIRIDARLHTPMYFFLSILSLLDLSYATTTVPQMLAHLVSKTKTISYTGCVIQMYIFLTLGITETWIFAAMAYDRYVAICYPLHYGVKMSQTLCIALVVSSALCGLICALVYTVFAMNLPYCGPNEINHFFCEIPAVLKLACADTSLNDQVDFILGFILLLIPLSLILASYVRIFIAILRICSTQGRMKAFSTCASHITVVTMFCVPCMVMYMRPGSEASPEDDKKLALFYNVISAFLNPIIYSLRNKDVKKAFFKLIGRGEDTQ

SEQ ID NO: 743 - protein, 305 aa, Artificial Sequence
  Synthetic
MQGPNQTFVTEFILLGFSLSPRTTPLLFSAFLIIYLLIILGNGLIFILICLDSHLHTPMYFFIGVLSMLDLGYTTTTVPQMLAHLASQKKTISYSNCVAQMYIFLVLGVTESWLFAIMSIDRYVAICHPLRYKVIMSPCLCGVMAIFCGLCGVTAALVYTIFAMRLPYCGPNKINHFFCEVPAVLKLACADTSVNDHVDFILGFSVILIPLSLILVIYINIFTSILKIRSAQGRLKAFSTCASHITVVTMFCVPAMVMYMKPGSKASPEEDKKLALFYNVISAFLNPVIYSLRNKECEEQGNRLW

SEQ ID NO: 744 - protein, 312 aa, Artificial Sequence
  Synthetic
MQGPNQTFVTEFILLGFSLSPRTTPLLFSAFLIIYLLIILGNGLIFILICLDSHLHTPMYFFIGVLSMLDLGYTTTTVPQMLAHLASQKKTISYSNCVAQMYIFLVLGVTESWLFAIMSIDRYVAICHPLRYKVIMSPCLCGVMAIFCGLCGVTAALVYTIFAMRLPYCGPNKINHFFCEVPAVLKLACADTSVNDHVDFILGFSVILIPLSLILVIYINIFTSILKIRSAQGRLKAFSTCASHITVVTMFCVPAMVMYMKPGSKASPEEDKKLALFYNVISAFLNPVIYSLRNKDVKRAFLKVTGCGRPPE

SEQ ID NO: 745 - protein, 315 aa, Artificial Sequence
  Synthetic
MQTLRKDNCSSVSEFLLLGFSSESQVRVALFIFFLLLYMITLLGNGLIITLIYLDSRLHTPMYFFLSILSLVDMSYVTTTVPQMLVNMVCPRRTISWGACVAQMFIFLLLGIAECVLYAIMAYDRYVAICFPLHYSVLMSRLVCIKMVTVCWSISITGALIYTVFTMRLPYCGPYKINHFFCEVPAVLKLACADTSFNDRLDFILGFIFLLVPLSLILASYACIFASILRIRSSQGRLKSFSTCASHITVVTMFYGPAMIMYMRPGSWYDPERDKKLALFYNVVSAFLNPIIYSLRNKDVKGAFLKVLGDRGAAK

SEQ ID NO: 746 - protein, 313 aa, Artificial Sequence
  Synthetic
MIPGQNQSWVSEFILIGFSSDPTTNSILFIVFLLIYLSSVLGNGLIIMLVCLDTQLHTPMYFFLSTLSLLDMSFVTTTMPQMLVHLLAHSQTISFASCCLQMFVFGALGITECTFFVVMAYDRYVAICYPLRYTVILNWGLCIRLAAGSWICGFFSSLLHTFFTMSLPYCGPNRVNHYFCEGPSVRSLACMDTHLIEMVDFVLSVFVVVIPISLIVASYIRIAMAILKIKSTQGRCKAFSTCASHLTVVTFFYAPATYIYLRPNSSYSPERDKQVSLFYNAFTALLNPVVYSLRNKDIKRAFLKVMGHSRLDQ

SEQ ID NO: 747 - protein, 315 aa, Artificial Sequence
  Synthetic
MWMIPEQNQSWVSEFILIGFSSDPTTNSILFIVFLLIYLSSVLGNGLIILLVCLDTQLHTPMYFFLCTLSLLDMSYVTTTMPQMLVHLLAHSQTISFAGCWLQMYVFGALGITECTFFVVMAYDRYVAICYPLRYTVILNWGLCIRLAAGSWICGFFSSLLHTFFTMSLPYCGPNRVNHYFCEGPSVRSLACMDTHLIEMVDFVLSVFVVVIPISLIVASYIRIAMAILKIKSTQGRCKAFSTCASHLTVVTFFYAPATYIYLRPNSSYSPERDKQVSLFYNAFTALLNPVVYSLRNKDIKRAFLKVMGHSRLDQ

SEQ ID NO: 748 - protein, 315 aa, Artificial Sequence
  Synthetic
MWMIPGQNQSWVSEFILIGFSSDPTTNSILFIVFLLMYLSSVLGNGLIIMLVCLDTQLHTPMYFFLCTISLLDMGYVTTTMPQMLVHLLAHSQTISFAGCWLQMYVFGALGMTECTFFVVMAYDQYVAICYPLRYTVILNWGLCIRLAGGSWICGLFSSLLHTFFTMSLPYCGPNRINHYFCEGPSVRSLACMDTHVIEMVDFVLSVFVVVIPISLIVASYIGIAMAILKIKSNQGRCKAFSTCASHLTVVTFFYAPASYIYMRPNSSYSPERDKQISLFYNVFTALLNPVVYSLRNKDIKRAFLKVMGHGRLAW

SEQ ID NO: 749 - protein, 315 aa, Artificial Sequence
  Synthetic
MWVVLGQNQSWVSEFILIGFSSDPTTNSILFIVFLLIYLSSVLGNGLIIMLVCLDTQLHTPMYFFLSTLSLLDMSYVTTTMPQMLVHLLAHSQTISFVGCWLQMFVFSALGITECTFFVVMAYDRYVAICYPLRYTVILNWGLCIHLTAGSWVCGLFSSLLHTFFTMSLPYCGPNRVNHYFCEGPSVRSLACMDTHVIEMVDFVLSVFVIVIPISLIVASYIGIAKAILKIKSTEGRCKAFSTCASHLTVVTFFYAPATYIYMRPNSSYSPERDKQISLFYNTFTALLNPVVYSLRNKDIKRAFFKVMGHGRMDY

SEQ ID NO: 750 - protein, 317 aa, Artificial Sequence
  Synthetic
MIPGQNQSWVSEFILIGFSSDPTTNSILFIVFLLIYLSSVLGNGLIIMLVCLDTQLHTPMYFFLSTLSLLDMSFVTTTMPQMLVHLLAHSQTISFASCCLQMFVFGALGITECTFFVVMAYDRYVAICYPLRYTVILNWGLCMRLAAGSWICGFFSSLLHTFFTMSLPYCGPNRVNHYLCEGPSVRSLACMDTHIIEMVDLVLSVFLVVTPISLIVASYIRIAMAILKIKSTEGRCKAFSTCASHLTVVTFFYAPASYIYMRPNSSYSPEQDKQISLFYSAFTPLLNPVVYSLRNKDIKRAFFKVMGYDRCASGPGW

SEQ ID NO: 751 - protein, 317 aa, Artificial Sequence
  Synthetic
MIPGQNQSWVSEFILIGFSSDPTTNSILFIVFLLIYLSSVLGNGLIIMLVCLDTQLHTPMYFFLSTLSLLDMTFVTTTMPQMLVHLLAHSQTISFTGCWLQMFMFGGLGITECTFFVVMAYDRYVAICYPLSYTVILNWGLCIRLAAGSCICGFFSSLLHTFFTMSLPYCGPNRVNHYLCEGPSVRSLACMDTHIIEMVDLVLSVFLVVTPISLIVASYIRIAMAILKIKSTEGRCKAFSTCASHLTVVTFFYAPATYTYLRPNSSYSPERDKQISLFYSAFTPLLNPVVYSLRNKDIKRAFLKVMGYGRCASGPGW

SEQ ID NO: 752 - protein, 315 aa, Artificial Sequence
  Synthetic
MWMIPGQNQSWVSEFILLGFSSVPTTNSILFIVFLLIYLSSVLGNGLIIMLVCLDTQLHTPMYFFLCTLSLLDMSFVTTTVPQMLVHLLAHSQTISFAGCWLQMFVFGALGMTECTFFVVMAYDRYVAICYPLRYTVILNWGLCIRLAGGTWISGFFSSLLHTFFTMSLPYCGPNRVNHYFCEGPSVRSLACMDTHVIEMVDSVLIVILVIVPISLIVASYIRIVMAILKIKSTQGRCKAFSTCASHLTVVTLFYVPASYIYLRPNSSYSPERDKQVSLFYNVFTALLNPVVYSLRNKDIKRAFLKVMGHARVDS

SEQ ID NO: 753 - protein, 313 aa, Artificial Sequence
  Synthetic
MWMFPRQNQSWVSEFILIGFSSDPTTNSILFIVFLLIYLNSVLGNGLIIMLVCLDTQLHTPMYFFLCTLSLLDMSYVTTTMPQMLVHLLAHSQTISFAGCWLQMYMFSALGIAESILFVVMAYDRYVAICYPLRYTVILNWGLCIRLAAGTWICGSFSSLLHTFFTMSLPYCGPKRVDHYFCEGPSVRSLACMDTHLIEMVDLVLSVFVVVTPISLIVASYIHITKAILKIKSTQARCKAFSTCASHLTVVTFFYIPAIYIYIRPNSSYSPERDKQISLFYNVFTALLNPVVYSLRNKDIKRAFLKVMGRMDW

SEQ ID NO: 754 - protein, 317 aa, Artificial Sequence
  Synthetic
MWRMSGQNQSWVSEFILLGFSSDSTTNSILFIVFLLIYLSSVLGNGLIIMLVCLDTQLHTPMYFFLSTLSLLDMGYVTTTMPQMLVHLLAHSQTISFASCWLQMYVFGALGMTESILFVVMAYDRYVAICYPLRYTVILNWDLCIRLAAGTWICGFFSSLLNTFFTMSLPYCGPNRVNHYLCEGPSVRSLACMDTHFVEMVDLVLSVFVVVTPISLIVASYIHIAKAILKIKSTQGRCKAFSTCASHLTVVTLFYLPATYIYMRPNSSSSSERDKQISLFYTAFTPLLNPVVYSLRNKDIKRAFLKVMFYWTRGPQW

SEQ ID NO: 755 - protein, 310 aa, Artificial Sequence
  Synthetic
MGQEFINQTWVNEFILLGLSSDRNTQVFLFVLVLAMYVVTVVGNTLILFLIRLDIRLHTPMYFFLSVLSIVDLCYGNSIAPQMLAHLVSAQKLIPFHSCVFQLYISLALGGSEFFLLGAMSYDRYVAVCHPLHYTVIMDGGVCLGLAASCLMAGFFNSLMETVITFRLPLCHNVINHFACETLAVLRLACVDISFNKVMVAISGFLVIMLPCCLVLFSYTRIVIAILRIRSTQGRHKAFGTCASHLTVVCMCFGATIFTYLGPRSASSEDKEKMVALFYAVVAPTLNPVIYSLRNKEVMAALTKLVEKLR

SEQ ID NO: 756 - protein, 317 aa, Artificial Sequence
  Synthetic
MGTDNQTWVSEFILLGLSSDWDTRVSLFVLFLVMYVVTVLGNCLIVLLIRLDSRLHTPMYFFLTNLSLVDVSYATSVVPQLLAHFLAEHKAIPFQSCAAQLFFSLALGGIEFVLLAVMAYDRYVAVCDALRYSAIMHGGLCARLAITSWVSGFISSPVQTAITFQLPMCRNKFIDHISCELLAVVRLACVDTSSNEVTIMVSSIVLLMTPFCLVLLSYIQIISTILKIQSREGRKKAFHTCASHLTVVALCYGVAIFTYIQPHSSPSVLQEKLFSVFYAILTPMLNPMIYSLRNKEVKGAWQKLLWKFSGLTSKLAT

SEQ ID NO: 757 - protein, 317 aa, Artificial Sequence; identical to SEQ ID NO: 756
  Synthetic

SEQ ID NO: 758 - protein, 317 aa, Artificial Sequence
  Synthetic
MEIDNQTWVREFILLGLSSDWCTQISLFSLFLVTYLMTVLGNCLIVLLIRLDSRLHTPMYFFLTNLSLVDVSYATSVVPQLLAHFLAEHKAIPFQSCAAQLFFSLALGGIEFVLLAVMAYDRHVAVSDRLRYSAIMHGGLCARLAITSWVSGSINSLVQTAITFQLPMCTNKFIDHISCELLAVVRLACVDTSSNEAAIMVSSIVLLMTPFCLVLLSYIRIISTILKIQSREGRKKAFHTCASHLTVVALCYGTTIFTYIQPHSGPSVLQEKLISVFYAIVMPLLNPVIYSLRNKEVKGAWHKLLEKFSGLTSKLGT

SEQ ID NO: 759 - protein, 317 aa, Artificial Sequence [sequence omitted]

SEQ ID NO: 760 - protein, 317 aa, Artificial Sequence
  Synthetic
MEQDNQTWVHEFILLGLSNDWGTQVSLFVLFLLMYLVTVLGNFLIIVLIRLDSRLHTPMYFFLTNLSLVDASYATSIVPQLLAHFLATHKAIPFLSCAAQLFFSLGLGGIEFLLLAVMAYDRYVAVCDPLRYSVIMHTGLCTRLVITSWVSGSINSLVHTAITFQLPMCTNKYIDHISCEILAVVRLACVDISSNEIVIMVSSIVLLMTPFFLVLLSYIQIISTILKIQSTEGRRKAFHTCASHLTVVTLCYGTTIFTYIQPHSSPSVLQEKLISLFYAVLMPMLNPMIYSLRNKEVKGAWQKLLGKFSVFTSKLTS

SEQ ID NO: 761 - protein, 317 aa, Artificial Sequence
  Synthetic
MGKDNQTWIHEFILLGLSSDWNTEVSLFVLFLLMYLVTVLGNFLIIVLIRLDSRLHTPMYFFLTNLSLVDVSYATSIVPQLLAHFLATHKTIPFLSCAAQLFFSLGLGGIEFVLLAMMAYDRYVAVCNPLRYSAIMHTGLCSRMAIVSWVGGSINSVMQTAITFQLPMCTNVYIDHISCELLAVVRLACVDTSANEVAIMVSSIILLMTPFCLVLLSYIQIISTILKIQSKEGRKKAFHTCASHLTVVALCYGMAIFTYIQPHSSPSVLQEKLISLFYAILTPMLNPMIYSLRNKEVKGAWQKLLGQFSEFTSKLKT

SEQ ID NO: 762 - protein, 313 aa, Artificial Sequence
  Synthetic
MKRDNATWVSEFILMGLSSDKHIQAGLFVLFGVIYLLTLLGNGLIVLLIALDPRLHLPMYFFLCHLSVVDICYTSSGVPQMLAHFLMEKKTISFALCGTQLFFALTLGGTEFLLLAAMAYDRYVAVCNPLRYTVVMNPRLCMGLAGVSWFVGVVNSAVETAVTMSLPTCGHNVLNHVACETLALVRLACVDITLNQVVILASSVVVLLVPCSLVSLSYAHIVAAIMKIRSTQGRRKAFETCASHLTVVSMSYGMALFTYMQPRSTASAEQDKLVVLFYAVVTPMLNPLIYSLRNKDVKAAFSRVLMKNIESKN

SEQ ID NO: 763 - protein, 313 aa, Artificial Sequence
  Synthetic
MKRDNATWVSEFILMGLSSDKHIQAGLFVLFGVTYLLTLLGNGLIVLLIALDPRLHLPMYFFLCHLSVVDICYTSSGVPQMLAHFLMEKKTISFALCGTQHFFALALGGTEFLLLAAMAYDRYVAVCNPLRYTVVMNPRLCMGLAGVSWFVGVVNSAVETAVTMRLPTCGHNVLNHVACETLALVRLACVDITLNQVVILASSVVVLLVPCCLVSLSYAYIVTAILKIRSTQGRRKAFGTCASHLTVVSMSYGMALFTHMEPTSTASVEQDKVVVVFYAVVTPMLNPLVYSLRNKDVKAAFSRVLMKIFESKN

SEQ ID NO: 764 - protein, 312 aa, Artificial Sequence
  Synthetic
MRENMTWVSEFILMGLTSDKNIQAGLFVLFGVTYLLTLLGNGLIVLLIALDPRLHLPMYFFLCHLSVVDICYTSSGVPQMLAHFLMEKKTISFALCGTQLLFALTLGGTEFLLLAAMAYDRSVAVCNPLRYTVVMNPRLCMGLAGVSWFVGVVNSAVETAVTMCLPTCGHNVLNHVACETLTLVRLACVDITLNQVVILASSVVVLMIPCSLVSLSYAHIVAAIMKIHSTQGRRKAFETCASHLTVVSMSYGMALFTYLQPASTASAEQDKVVVIFYALVTPMMNPLIYSLRNKDVKAAFRRVLMKNIESKN

SEQ ID NO: 765 - protein, 308 aa, Artificial Sequence
  Synthetic
MRQINQTQVTEFLLLGLSDGPHTEQLLFIVLLGVYLVTVLGNLLLISLVHVDSQLHTPMYFFLCNLSLADLCFSTNIVPQALVHLLSRKKVIAFTLCAARLLFFLIFGCTQCALLAVMSYDRYVAICNPLRYPNIMTWKVCVQLATGSWTSGILVSVVDTTFILRLPYRGSNSIAHFFCEAPALLILASTDTHASEMAIFLMGVVILLIPVFLILVSYGRIIVTVVKMKSTVGSLKAFSTCGSHLMVVILFYGSAIITYMTPKSSKQQEKSVSVFYAIVTPMLNPLIYSLRNKDVKAALRKVATRNFP

SEQ ID NO: 766 - protein, 308 aa, Artificial Sequence; identical to SEQ ID NO: 765
  Synthetic

SEQ ID NO: 767 - protein, 315 aa, Artificial Sequence
  Synthetic
MMQANQTQVTEFILLGLSDDPHTQKLLFILFLGIYMVTVLGNLLLMFLVRADSRLHTPMYFFLCNLSLADLCFSTNIVPQALIHLLSRKKTISFRRCAAQLLLFLIFGCTQCALLAVMSYDRYVAICNPLHYSSIMTWRVCIQLATVSWTSGILVSVVDTTFTLRLPYRGSNSIAHFFCEAPALLALASTDTQTSEMAIFLMGVVILLIPVSLILVSYGHIIVTVVKMKSAAGRFKAFSTCGSHLMVVILFYGSAIITYMTPKSSKEQEKLVSVFYAMVTPMLNPLIYSLRNKDVKGALWKVAMKNFSSRLRITH

SEQ ID NO: 768 - protein, 315 aa, Artificial Sequence; identical to SEQ ID NO: 767
  Synthetic

SEQ ID NO: 769 - protein, 310 aa, Artificial Sequence
  Synthetic
MMQANQTQVTEFILLGLSDDPHTQKLLFILFLGIYMVTVLGNLFLMFLVRADSRLHTPMYFFLCNLSLADLCFSTNIVPQALIHLLSRKKTISFRRCAAQLLLFLIFGCTQCALLAVMSYDRYVAICNPLHYSSTMTWRVCIQLATVSWTSGILVSVVDTTFTLRLPYRGSNSIAHFFCEAPALLALASTDTQTSEMAIFLMGVVILLIPVSLILVSYGHIIVTVVKMKSAAGRFKAFSTCGSHLMVVILFYGSGIITYMTPKSSKEQEKLVSVFYAMVTPMLNPLIYSLRNKDVKGALWKVATRLRITH

SEQ ID NO: 770 - protein, 314 aa, Artificial Sequence
  Synthetic
MGEENQTFVSKFIFLGLSQDLQTQILLFILFLIIYLLTVLGNQLIIILIFLDSRLHTPMYFFLRNLSFADLCFSTSIVPQVLVHFLVKRKTISFYGCMTQIIVFLLVGCTECALLAVMSYDRYVAVCKPLYYSTIMTQRVCLWLSFRSWASGALVSLVDTSFTFHLPYWGQNIINHYFCEPPALLKLASIDTYSTEMAIFSMGVVILLAPVSLILGSYWNIISTVIQMQSGEGRLKAFSTCGSHLIVVVLFYGSGIFTYMRPNSKTTKELDKMISVFYTAVTPMLNPIIYSLRNKDVKGALRKLVGRKCFSHRQ

SEQ ID NO: 771 - protein, 307 aa, Artificial Sequence
  Synthetic
MGEDNRTSVTEFIFLGLSQDPQTQVLLFFLFLFIYLLTVLGNLLIIVLIHSDPRLHTPMYFFLRNLSFADLCFSTTTVPQVLVHFLVKRKTISFTGCSIQLVVLLLVGCTDCALLAVMSYDRYVAVCKPLHYSTIMTHWVCLQLAAGSWASGAFVSLVDATFTLRLPYRGDNVINHFFCEPPALLKLASADTYSTEMAIFAMGVVILLAPVSLILISYWNIICTVIQMQSGEGRLKVFSTCGSHLIVVGLFYGSAIFAYMRPNSKIMNERDKMISVFYSAVTPMLNPIIYSLRNKDVKGALRRITSR

SEQ ID NO: 772 - protein, 306 aa, Artificial Sequence
  Synthetic
MGEDNRTSVTEFIFLGLSQDPQTQVLLFFLFLFIYLLTVLGNLLIIVLIHSDPRLHTPMYFFLRNLSFADLCFSTTTVPQVLVHFLVKRKTISFAGCSTQIVVLLLVGCTECALLAVMSYDRYVAVCKPLHYSTIMTHWVCVQLAAGSWASGALVSLVDTTFTLRLPYRGNNVINHFFCEPPALLKLASADTYSTEMAIFAMGVVILLAPVSLILTSYWNIVSTVIQMQSGEGRLKVFSTCGSHLIVVVLFYGSGIFAYMRPNSKIMNEKDKMISVFYSAVTPMLNPIIYSLRNKDVKGALKRITT

SEQ ID NO: 773 - protein, 314 aa, Artificial Sequence
  Synthetic
MGRENQSFVDEFVLLGLSQDAQTQILLFVLFFIVYILTVLGNLLIIVLILMDSRLHTPMYFFLRNLSFADLCFSNSIVPQVLSHFLVKRKTISFWGCVTQVIVSLQIGCTECALLAVMSYDRYVAVCKPLHYSTIMTQQLCLQLALGSWASGLLVCLVDIAVAFHLPYRGQNIVSHYFCELPALLKVASADTYSTEMAIFAMGVVILLAPVSLILISYWNIISTVIQMQSGEGRLKVFSTCGSHLIVVVLFYGSAIFNYMQPNTKTRKKQDKIMSVFYTVVTPMLNPIIYSLRNKDVKSAFRKLAARVVFFRKQ

SEQ ID NO: 774 - protein, 318 aa, Artificial Sequence
  Synthetic
MGGGNQTYIVEFILLGLSENPKVQILLFCIFLIIYFLSVFGNLVIIILIQIDSRLHTPMYFFLKNLSFADLCFSTSIVPQMLVHFLSKRKTISFIGCSIQIVVFLLAGCTECALLAVMSYDRYVAVCKPLHYSTIMTQRVCCQLAIVSWISGAFACSVDSAFTLCIPYQGQNVINHYFCEPPALLKLASADTYNAEMALFLVGVIILLAPVSLILVSYGNIISTVIRMQSREGRLKVFSTCGSHLTVVVLYYGSGIFAYMRPNSKTMSEKDKVVSVFYSVMTSMLNPIIYSLRNKDVKGALGKLVGRLSTVKGGAAEM

SEQ ID NO: 775 - protein, 310 aa, Artificial Sequence
  Synthetic
MGKLNHTYLTEFILLGLSSDHQTQILLFVVFLIIYLITVFGNLLIILLIHVDSRLHTPMYFFLKILSFNDLCFSTTIVPKMLVHFLGVRKTISFAGCSVQMFSFLIMGCTESSLLAVMSYDRYIAVCKPLHYSTIMTHKVCVLLVVGSWTSGIFVSVVDTSFTLCLTYRGPNIINHYFCEPPALLKLASEETYTAEMVIFAMGIIILLGPVSLILFSYWNIISTVVQIQSGEGRLKVFSTCSSHFIVVIFFYGSTIFTYMQPNSKKMNEKDKVISVFYSIVTSMMNPFIYSLRNKDVKGALKKVLKREIR

SEQ ID NO: 776 - protein, 311 aa, Artificial Sequence
  Synthetic
MDHMKTNFTVTEFVFLGLSSDPKVQLVLFFVFLFFYMLSVVGNIIIITIIQIEPRLKTPMYFFLANLSFLDICYTSTNVPQMLSNMVGSKKTIPFASCATQMYFSLSFGMIECVLLGVMAYDRYVAICHPLHYTVIMDQNTCIQLAAISWSSSFLSSMVINVLTLSLPYCGPNVLNHFFCEVPSVLRLACTDTSLTELVVFVFSIIIVFIPFLLIIVSYARILLSVLRMRSASGRHKALSTCASHLTVVTLFYGTAIFMYMRPQSKSSRAGGKVIAVFYTVVTPMLNPLIYSLRNQDVKGSLRRAITKQKT

SEQ ID NO: 777 - protein, 307 aa, Artificial Sequence
  Synthetic
NQTWVTDFILVGLQLSAGIEMFLFWIFSLLYIFSLLANGIILVVICLDPKLHTPMYFFLSHLAILDISYASNNVPKMLSNLINQKRTISFAPCITQTFLYLAFAASECLILAAMSYDRFVAICHPLHYTVIMSWKVCVALAVTSWSCGFSLSVAHTILLLRLPFCGPQEINHLFCEILAVLKLACADTLINQIVILAACVFVLVGPLCSMLVSYTHILWTILKMQSKEGRRKAFSTCSSHLCVVGLFFGIAMLVYMVPDSDQREEQEKILSLFHSLFNPMLNPLIYSLRNTQVKEAFHRALQKKRSV

SEQ ID NO: 778 - protein, 318 aa, Artificial Sequence
  Synthetic
MEGNQTWITDITLLGFQVGPALAILLCGLFSVFYTLTLLGNGVIFGIICLDSKLHTPMYFFLSHLAIIDMSYASNNVPKMLANLMNQKRTISFVPCIMQTFLYLAFAVTECLILVVMSYDRYVAICHPFQYTVIMSWRVCTILVLTSWSCGFALSLVHEILLLRLPFCGPRDVNHLFCEILSVLKLACADTWVNQVVIFATCVFVLVGPLSLILVSYMHILGAILKIQTKEGRIKAFSTCSSHLCVVGLFFGIAMVVYMVPDSNQREEQEKMLSLFHSVFNPMLNPLIYSLRNAQLKGALHRALQRKRSMRTVYGLCL

SEQ ID NO: 779 - protein, 294 aa, Artificial Sequence
  Synthetic
MRANQTWITEVTLLGFQADLSVECFLFGLFSLFYSFTLLGNGIILVVICLDNRLHIPMYFFLSHLAIVDMSYASNNVPKMLANLVTQRRTISFILCIMQTFLYLAFACTECLILVVMSYDRFVAICHPLHYTVIMSWKVCTILAAVSWIAGFLLALVHLVLILKLPFCGPHEINHFFCEILSVLKLACADTTLNQVVILAACVFILVGPLCLVLVSYTRILVTILRIQSGEGRRKAFITCSSHLCVVGLFFGSAIVMYMAPKSQHPELQQKILSLFYSLFNPMLNPPDLLPEEC

SEQ ID NO: 780 - protein, 310 aa, Artificial Sequence
  Synthetic
MEGNKTWITDITLPRFQVGPALEILLCGLFSAFYTLTLLGNGVIFGIICLDCKLHTPMYFFLSHLAIVDISYASNYVPKMLTNLMNQESTISFFPCIMQTFLYLAFAHVECLILVVMSYDRYADICHPLRYNSLMSWRVCTVLAVASWVFSFLLALVPLVLILSLPFCGPHEINHFFCEILSVLKLACADTWLNQVVIFAACVFILVGPLCLVLVSYLRILAAILRIQSGEGRRKAFSTCSSHLCVVGLFFGSAIVTYMAPKSRHPEEQQKVLSLFYSLFNPMLNPLIYSLRNAEVKGALRRALRKERLT

SEQ ID NO: 781 - protein, 310 aa, Artificial Sequence; identical to SEQ ID NO: 780
  Synthetic

SEQ ID NO: 782 - protein, 310 aa, Artificial Sequence
  Synthetic
MTENQTWIPEFTLQGFLLSPRMQMLLCGLFSLLYTFTLLGNGVILGLIWLDCRLHTPMYFFLSHLAIVDISYATNNVPKMLANLLAKKKSISFAPCIMQTFLYMAFAHTECLILVMMSYDRYAAICQPLQYSVIMSWKVCTIMAVASWACGSLLALVHVVLILRLPFCGLHEINHFFCEILSVLKLVCADTTLNQIVIFAGSVFILVGPLCFVLVSYTRILIAILKIQSGEGRRKAFSTCSSHLCVVGLFFGSAIVMYMAPKSQHPETQQKVLSLFYSLFNPMLNPLIYSLRNAEVKGAVKRVLWKQRSR

SEQ ID NO: 783 - protein, 310 aa, Artificial Sequence
  Synthetic
MTKNQTWVTEFILLGFPLSLRIQMLLSGLFSLLYVFTLLGNGAILGLIWLDSRLHTPMYFFLSHLAIIDISYASNNVPKMLTNLLNKRKTISFVPCTMQTFLYMAFAHTECLILVMMSYDRYMAICHPLQYSVIMRWGVCTVLAVTSWACGSLLALVHVVLILRLPFCGPHEINHFFCEILSVLKLACADTWLNQVVIFAASVFILVGPLCLVLVSYSRILAAILRIQSGEGRRKAFSTCSSHLCMVGLFFGSAIVMYMAPKSRHPEEQQKVLSLFYSLFNPMLNPLIYSLRNAEVKGALKRVLWKQRSK

SEQ ID NO: 784 - protein, 318 aa, Artificial Sequence
  Synthetic
MEENQTTVTEFILLGFCLGPRIHLVLFLLFSLFYTLTILGNGTILAMICLDSRLHTPMYFFLSHLAIVDMAYACNTVPQTLINLLDETRPITFAGCMTQTYLFLTFAITECLLLVVMSYDRYVAICHPLHYTVIMNWRVCTIMAAVSWIVSFLLSLVHLLLILRLPFCGPHEINHFFCEILSVLKLACADTTLNQVVIFAACVFTLVGPLCFVLVSYTRILVAILRIQSGERRRKAFSTCSSHLCVVGLFFGSAIVMYMAPKSQHPEEQQKILFLFYSFFNPMLNPLIYSLRNAEVKGALRRALCKHSCLVWCSHHKP

SEQ ID NO: 785 - protein, 318 aa, Artificial Sequence
  Synthetic
MEENQTMVTEFVLLGFCLGPRIHLVLFLLFSLFYTLTILGNGTILAMICLDSRLHTPMYFFLSHLAIVDMAYACNTVPQTLINLLDETRPITFAGCMTQTFLFLAFAHTECVLLVVMSYDRYVAICHPLHYTVIMNWRVCTILAAVSWIFSFLLALVHLVLILRLPFCGPHEINHFFCEILSVLKLACADTTLNQVVIFAACVFILVAPLCFVLVSYTRILVAILRIQSGEGRRKAFSTCSSHLCVVGLFFGSAIVMYMAPKSQHPEEQQKVLFLFYSFFNPMLNPLIYSLRNAEVKGALKRSLCKESHSWLVWCSDH

SEQ ID NO: 786 - protein, 313 aa, Artificial Sequence
  Synthetic
MKENQTMVTEFILLGFCLGPRIHVILFALFSVCYIFTLLGNGFTLGLICLEPRLHSPMYFFLSNLATVDIAYACNTVPQTLVNLLDETKPISFAGCMMQTYLFLTFGSTECVLLVVMSYDRYVAICHPLHYTVIMNWRVCTIMAAVSWIFSFLLALVHLVLILRLPFCGPHEVNHFFCEILSVLKLACADTTLNQVVIFAACVFALVGPLCLVLVSYTRILVTILRIQSGEGRRKAFSTCSSHLCVVGLFFGSAIVMYIAPKSQHPEELQKILFLFYSFFNPMLNPLIYSLRNAEVKGALRRSLCNENHSQLV

SEQ ID NO: 787 - protein, 310 aa, Artificial Sequence
  Synthetic
MGENQTMVTEFLLLGFLLGPRIQMLLFGLFSLFYIFTLLGNGAILGLISLDSRLHTPMYFFLSHLAVVDIAYTRNTVPQMLANLLHPAKPISFAGCMTQTFLCLSFGHSECLLLVLMSYDRYVAICHPLRYSVIMTWRVCITLAVTSWTCGSLLALAHVVLILRLPFSGPHEINHFFCEILSVLRLACADTWLNQVVIFAACVFFLVGPPSLVLVSYSHILAAILRIQSGEGRRKAFSTCSSHLCVVGLFFGSAIIMYMAPKSRHPEEQQKVFFLFYSFFNPTLNPLIYSLRNGEVKGALRRALGKESHS

SEQ ID NO: 788 - protein, 310 aa, Artificial Sequence; identical to SEQ ID NO: 787
  Synthetic

SEQ ID NO: 789 - protein, 310 aa, Artificial Sequence [sequence omitted]

SEQ ID NO: 790 - protein, 307 aa, Artificial Sequence
  Synthetic
NQTWITEVILLGFQVDPALELFLFGFFLLFYSLTLMGNGIILGLIYLDSRLHTPMYVFLSHLAIVDMSYASSTVPKMLANLVMHKKVISFAPCILQTFLYLAFAITECLILVMMCYDRYVAICHPLQYTLIMNWRVCTVLASTCWIFSFLLALVHITLILRLPFCGPQKINHFFCQIMSVFKLACADTRLNQVVLFAGSAFILVGPLCLVLVSYLHILVAILRIQSGEGRRKAFSTCSSHLCVVGLFFGSAIVMYMAPKSSHSQERRKILSLFYSLFNPILNPLIYSLRNAEVKGALKRVLWKQRSM

SEQ ID NO: 791 - protein, 307 aa, Artificial Sequence
  Synthetic
NQTWITEVILLGFQVDPSLEMLLFGLFLLFYCLTLMGNGIILGLICLDARLHTPMYFFLSHLAIVDMSYASSTAPKMLTNMVMHQKSISFASCILQTFLYLAFAVTECLILVVMSYDRFVAICHPLKYTLIMSWRVCSILAATCWVFSFLLASLHITLILRLPFCGPQKVNHFFCQIMSVFRLACADTRLNQVVLFAGSVMVLLGPLCLVLVSYTRILVAILGIHSGEGRRKAFSTCSSHLCVVGLFFGCAIAMYMAPKSKHSQEQRKILSLFYSLFNPMLNPLIYSLRNTEVKGALRRVLWKQRSL

SEQ ID NO: 792 - protein, 310 aa, Artificial Sequence
  Synthetic
MGDNITSIREFLLLGFPVGPRIQMLLFGLFSLFYVFTLLGNGTILGLISLDSRLHAPMYFFLSHLAVVDIAYACNTVPRMLVNLLHPAKPISFAGRMMQTFLFSTFAVTECLLLVVMSYDLYVAICHPLRYLAIMTWRVCITLAVTSWTTGVLLSLIHLVLLLPLPFCRPQKIYHFFCEILAVLKLACADTHINENMVLAGAISGLVGPLSTIVVSYMCILCAILQIQSREVQRKAFRTCFSHLCVIGLVYGTAIIMYVGPRYGNPKEQKKYLLLFHSLFNPMLNPLICSLRNSEVKNTLKRVLGVERAL

SEQ ID NO: 793 - protein, 310 aa, Artificial Sequence [sequence omitted]

SEQ ID NO: 794 - protein, 310 aa, Artificial Sequence
  Synthetic
MGDNITSITEFLLLGFPVGPRIQMLLFGLFSLFYVFTLLGNGTILGLISLDSRLHAPMYFFLSHLAVVDIAYACNTVPRMLVNLLHPAKPISFAGRMMQTFLFSTFAVTECLLLVVMSYDLYVAICHPLRYLAIMTWRVCITLAVTSWTTGVLLSLIHLVLLLPLPFCRPQKIYHFFCEILAVLKLACADTHINENMVLAGAISGLVGPLSTIVVSYMCILCAILQIQSREVQRKAFCTCFSHLCVIGLFYGTAIIMYVGPRYGNPKEQKKYLLLFHSLFNPMLNPLICSLRNSEVKNTLKRVLGVERAL

SEQ ID NO: 795 - protein, 307 aa, Artificial Sequence
  Synthetic
NMTLITEFILLGFPLSPRMQMLLFALFSLFYAFTLLGNGTIVGLICLDSRLHTPMYFFLSHLAIVDIAYACNTVPQMLVNLLDPVKPISYAGCMTQTFLFLTFAITECLLLVVMSYDRYVAICHPLRYSAIMSWRVCSTMAVTSWIIGVLLSLIHLVLLLPLPFCVSQKVNHFFCEITAILKLACADTHLNETMVLAGAVSVLVGPFSSIVVSYACILGAILKIQSEEGQRKAFSTCSSHLCVVGLFYGTAIVMYVGPRHGSPKEQKKYLLLFHSLFNPMLNPLIYSLRNSDVKNTLKRVLRTQRAL

SEQ ID NO: 796 - protein, 310 aa, Artificial Sequence
  Synthetic
MGGNQTLITQFILLGFPLSPRMQMLLFALFSLFYAFTLLGNGTILGLICLDSRLHTPMYFFLSHLAIVDIAYACNTVPQMLVNLMDPAKPISFAGCMTQTFLFLTFAHTECLLLVVMSYDRYVAICHPLRYTAIMSWRVCVILVLTSWILGVLLALVHLVLLLPLPFCGSQKVNHFFCEIIAVLKLACSDTRINELMVLAGAVSVLVGPFSSIVVSYAHILCAILKIKSQQGRQKAFSTCSSHLCVVGLFYGTAIVMYIGPQHGKSNEQKKYLLLFHSLFNPMLNPLIYSLRNKEVKSALKRTLLKEDTS

SEQ ID NO: 797 - protein, 310 aa, Artificial Sequence; identical to SEQ ID NO: 796
  Synthetic

SEQ ID NO: 798 - protein, 310 aa, Artificial Sequence
  Synthetic
MGGNQTSITEFLLLGFPIGPRIQMLLFGLFSLFYIFILLGNGTILGLISLDSRLHTPMYFFLSHLAVVDIACACSTVPQMLVNLLHPAKPISFAGCMTQMFLFLSFAHTECLLLVVMSYDRYVAICHPLRYSTIMTWKVCITLALTSWILGVLLALVHLVLLLPLSFCGPQKLNHFFCEIMAVLKLACADTHINEVMVLAGAVSVLVGAFFSTVISYVHILCAILKIQSGEGCQKAFSICSSHLCVVGLFYGTAIIMYVEPQYESPKEQKKYLLLFHSLFNPMLNPLIYSLRNKEVQGTLKRMLEKKRTS

SEQ ID NO: 799 - protein, 316 aa, Artificial Sequence
  Synthetic
MQGENFTIWSIFFLEGFSQYPGLEVVLFVFSLVMYLTTLLGNSTLILITILDSRLKTPMYLFLGNLSFMDICYTSASVPTLLVNLLSSQKTIIFSGCAVQMYLSLAMGSTECVLLAVMAYDRYVAICNPLRYSIIMNRCVCARMATVSWVTGCLTALLETSFALQIPLCGNLIDHFTCEILAVLKLACTSSLLMNTIMLVVSILLLPIPMLLVCISYIFILSTILRITSAEGRNKAFSTCGAHLTVVILYYGAALSMYLKPSSSNAQKIDKIISLLYGVLTPMLNPIIYSLRNKEVKDAMKKLLGKITLHQTHEHL

SEQ ID NO: 800 - protein, 316 aa, Artificial Sequence; identical to SEQ ID NO: 799
  Synthetic

SEQ ID NO: 801 - protein, 313 aa, Artificial Sequence
  Synthetic
MPGENVTVWSLFFLEGFSRYPRLEIVLFVFSLVMYLVTILGNCTLILITVLDSRLQTPMYLFLGNLSFMDICYTSASIPTLLVNLLSSKKTIIFSGCAVQMYLSLSMGSTECILLAVMAYDRYVAICNPLRYPIIMNRQVCVQMATISWVTGCLTALLETSFALQIPLCGNIINHFTCEILAVLKLACVSSLLMDLVMLVVSILLLPIPMLLICISYGFILSTILRISSTEGRNKAFSTCGAHLTVVILYYGAALSMYLKPSSSNSQEIDKIISLLYGVLTPMLNPIIYSLRNKEVKDAVIKLLGKVPLAPSV

SEQ ID NO: 802 - protein, 313 aa, Artificial Sequence
  Synthetic
MPGENVTVWSLFFLEGFSRYPRLEIVLFVFSLVMYLVTILGNCTLILITVLDSRLQTPMYLFLGNLSFMDICYTSASIPTLLVNLLSSKKTIIFSGCAVQMYLSLSMGSTECILLAVMAYDRYVAICNPLRYPIIMNRQVCVQMATISWVTGCLTALLETSFALQIPLCGNIINHFTCEILAVLKLACVSSLLMDLVMLVVSILLLPIPMLLICISYGFILSTILRISSTEGRNKAFSTCGAHLTVVILYYGAALSMYLKPSSSNSQEIDKIISLLYGVLTPMLNPIIYSLRNKEVKDAMIKLLGKVPLAPSV

SEQ ID NO: 803 - protein, 319 aa, Artificial Sequence
  Synthetic
MFPANWTSVKVFFFLGFFHYPKVQVIIFAVCLLMYLITLLGNIFLISITILDSHLHTPMYLFLSNLSFLDIWYSSSALSPMLANFVSGRNTISFSGCATQMYLSLAMGSTECVLLPMMAYDRYVAICNPLRYPVIMNRRTCVQIAAGSWMTGCLTAMVEMMSVLPLSLCGNSIINHFTCEILAILKLVCVDTSLVQLIMLVISVLLLPMPMLLICISYAFILASILRISSVEGRSKAFSTCTAHLMVVVLFYGTALSMHLKPSAVDSQEIDKFMALVYAGQTPMLNPIIYSLRNKEVKVALKKLLIRNHFNTAFISILK

SEQ ID NO: 804 - protein, 319 aa, Artificial Sequence [sequence omitted]

SEQ ID NO: 805 - protein, 319 aa, Artificial Sequence
  Synthetic
MVQGNWTSVTVFVFLGFSHYPRIEVTVFVLCLLMYLITLLGNTILISITILDSHLHTPMYFFLSNLSFLDIWYTSSALTPMLANFVSGKNTISFSGCASQMYFSLAMGSTECVLLSMMAYDRYVAICNPLRYPIIMNRRVCVQIAGSSWVTGCLTALVETGPVIHLSLCGNSIINHFTCEILALLKLACGDTSMVQLIMLVISILLLPLPMLLICVSYASILSNILRISSMDGRSKAFSTCAAHLTVVVLFYGTALSMYLKPSSVNSQEIDKFMALIYTGLTPMLNPIIYSLRNKEVKMAVKKLLMKNPFSAILTSVLK

SEQ ID NO: 806 - protein, 314 aa, Artificial Sequence
  Synthetic
METRNYSAMTEFFLVGLSQYPELQLFLFLLCLIMYMIILLGNSLLIIITILDSRLHTPMYFFLGNLSFLDICYTSSSIPPMLIIFMSERKSISFIGCALQMVVSLGLGSTECVLLAVMAYDHYVAICNPLRYSIIMNGVLYVQMAAWSWIIGCLTSLLQTVLTMMLPFCGNNVIDHITCEILALLKLVCSDITINVLIMTVTNIVSLVILLLLIFISYVFILSSILRINCAEGRKKAFSTCSAHSIVVILFYGSALFMYMKPKSKNTNTSDEIIGLSYGVVSPMLNPIIYSLRNKEVKEAVKKVLSRHLHLLKM

SEQ ID NO: 807 - protein, 323 aa, Artificial Sequence
  Synthetic
DLEHMETRNYSAMTEFFLVGLSQYPELQLFLFLLCLIMYMIILLGNSLLIIITILDSRLHTPMYFFLGNLSFLDICYTSSSIPPMLIIFMSERKSISFIGCALQMVVSLGLGSTECVLLAVMAYDHYVAICNPLRYSIIMNGVLYVQMAAWSWIIGCLTSLLHTVLTMMLPFCGNNVIDHITCEILALLKLVCSDITINVLIMTVTNIVSLVILLLLIFISYVFILSSILRINCAEGRKKAFSTCSAHLIVVILFYGSALFMYMKPKSKNTNTSDEIIGLSYGVVSPMLNPIIYSLRNKEVKEAVKKVLSRHLHLLKMERPLE

SEQ ID NO: 808 - protein, 314 aa, Artificial Sequence
  Synthetic
MKMGNYSAVTEFFLVGLSQYPELQLFLFVLCLIMYLIILLGNSLLIIISILDSRLHTPMYFFLGNLSFLDICYTSSSIPQMLIMFMSARKSISFLGCALQMVISLGLGSTECVLLAVMAYDRYAAICNPLRYPIIMNKVLYVHMAVWSWVIGCLNSLVQTVLTMVLPFCGNNVIDHLTCEILALLKLVCSDITMNVLIMTVASIVLLMIPLMLIFVSYIFILSSILRINSAEGRKKAFSTCSAHLTVVILFYGSALFMYMKPKSKYTKASDEIIGLSYGVVTPMLNPIIYSLRNKEVKEAVKKILSKRLYLRKI

SEQ ID NO: 809 - protein, 313 aa, Artificial Sequence
  Synthetic
MEKANETSPVMGFVLLRLSAHPELEKTFFVLILLMYLVILLGNGVLILVTILDSRLHTPMYFFLGNLSFLDICFTTSSVPLVLDSFLTPQETISFSACAVQMALSFAMAGTECLLLSMMAFDRYVAICNPLRYSVIMSKAAYMPMAASSWAIGGAASVVHTSLAIQLPFCGDNVINHFTCEILAVLKLACADISINVISMEVTNVIFLGVPVLFISFSYVFIITTILRIPSAEGRKKVFSTCSAHLTVVIVFYGTLFFMYGKPKSKDSMGADKLIPLFYGVVTPMLNPIIYSLRNKDVKAAVRRLLRPKGFTQ

SEQ ID NO: 810 - protein, 312 aa, Artificial Sequence
  Synthetic
MVSANQTASVTEFILLGLSAHPKLEKTFFVLILLMYLVILLGNGVLILVTVSNSHLHMPMYFFLGNLSFLDICYTTYSVPLILDSFLTPRKTISFSACAVQMFLSFAMGATECVLLSMMAFDRYVAICNPLRYPVVMSKAAYMPMAVGSWVAGSTASMVQTSLAMRLPFCGDNIINHFTCEILAVQKLACADISVNVISMGVTNVIFLGVPVLFISFSYVFIIATILRIPSAEGRKKAFSTCSAHLTVVVIFYGTILFMYGKPKSKDPLGADKLISLFYGVVTPMLNPIIYSLRNKDVKAAVRDLAFQKCFA

SEQ ID NO: 811 - protein, 313 aa, Artificial Sequence
  Synthetic
MERSNKTTPVSSFILLGLSAHPKLEKTFFVLILLMYLVILLGNVVLILVSILDSHLHTPMYFFLGNLSFLDICYTTSSVPLILDSFLTPRKTISFSGCAVQMFLSFAMGATECVLLGMMAFDRYVAICNPLRYPVVMSKAAYVPMAAGSWVSGSITATVQISLAMTLPFCGDNVINHFTCEILAVLKLACADISINVISMAVANAMFLGVPVLFIFVSYIFILSTILRIPSAEGRKKAFSTCSAHLTVVLVFYGTILFMYGKPKSKDPLGADKLISLFYGVVTPMLNPIIYSLRNKDVKAAVTNLVGQKHFKW

SEQ ID NO: 812 - protein, 313 aa, Artificial Sequence
  Synthetic
MDRSNETAPLSGFILLGLSAHPKLEKTFFVLILMMYLVILLGNGVLILVSILDSHLHTPMYFFLGNLSFLDICYTTSSVPLILDSFLTPRKTISFSGCAVQMFLSFAMGATECVLLSMMAFDRYVAICNPLRYPVVMNKAAYVPMAASSWAGGITNSVVQTSLAMRLPFCGDNVINHFTCEILAVLKLACADISINVISMVVANMIFLAVPVLFIFVSYVFILVTILRIPSAEGRKKAFSTCSAHLTVVLVFYGTILFMYGKPKSKDPLGADKLISLFYGVVTPMLNPIIYSLRNKDVRAAVRNLVGQKHLTE

SEQ ID NO: 813 - protein, 312 aa, Artificial Sequence
  Synthetic
MEGANQSTVAEFVLLGLSDHPKLEKTFFVLILLMYLVILLGNGVLILVSILDSHLHTPMYFFLGNLSFLDICYTTSSIPLVLDGFLTPRKTISFSGCAVQMFLSFAMGATECVLLGMMAFDRYVAICNPLRYPVVMNKSAYVPMAVSSWVAGGANSLVQISLAVQLPFCGDNVINHFTCEILAVLKLACADISINVISMGVANVIFLGVPVLFIFVSYIFILSTILRIPSAEGRKKAFSTCSAHLTVVLVFYGTILFMYGKPKSKDPLGADKLISLFYGVLTPMLNPIIYSLRNKDVKAAVRNLVGQKCLIQ

SEQ ID NO: 814 - protein, 312 aa, Artificial Sequence
  Synthetic
MDVSNQTTVTEFVLLGLSAHPKLEKTFFVLILSMYLVILLGNGVLILVSILDSHLHTPMYFFLGNLSFLDICYTTSSVPLVLDGFLTPRKTISFSGCAVQMFLSFAMGATECVLLGMMAFDRYVAICNPLRYPVVMNKAAYVPMAVSSWVAGGANSLVQISLAVQLPFCGDNVINHFICEILAVLKLACADISINVISMGVANVIFLGVPVLFIFVSYIFILSTILRIPSAEGRKKAFSTCSAHLTVVIIFYGTILFMYGKPKSKDPLGADKLISLFYGLLTPMLNPIIYSLRNKDVKAAVRNLASHRCLTF

SEQ ID NO: 815 - protein, 314 aa, Artificial Sequence
  Synthetic
MERTNDSTSTEFFLVGLSAHPKLQTVFFVLILWMYLMILLGNGVLISVIIFDSHLHTPMYFFLCNLSFLDVCYTSSSVPLILASFLAVKKKVSFSGCMVQMFISFAMGATECMILGTMALDRYVAICYPLRYPVIMSKGAYVAMAAGSWVTGLVDSVVQTAFAMQLPFCANNVIKHFVCEILAILKLACADISINVISMTGSNLIVLVIPLLVISISYIFIVATILRIPSTEGKHKAFSTCSAHLTVVIIFYGTIFFMYAKPESKASVDSGNLISLFYGVMTPMLNPLIYSLRNKDVKAAVKNILCRKNFSDGK

SEQ ID NO: 816 - protein, 313 aa, Artificial Sequence
  Synthetic
MEMTNDSMLTEFLLVGLSDHPKLQTVLFVLVLCMYLMILLGNGVLIAVVIHDIRLHTPMYFFLCNLSFLDICYTSSSVPLILSSFLTVRKRVSFSECMIQMFFSFAMGATECVLLGTMALDRFMAICYPLRYPVIMSKDTYVPMAAGCWVAGLVDSVVQTSLAVQLPFCTNNVIHHFVCEILGILELACADISINVISLTGSNLLFLAVPLLVIAVSYMFIIATILRIPSAEGKRKAFSTCSAHLTVVIIFYGTIFSMYAKPKSKDTAGAGHLISLFYGVMTPMLNPLIYSLRNKDVKAAVQNMLGRKTLSKM

SEQ ID NO: 817 - protein, 311 aa, Artificial Sequence
  Synthetic
MGEINQTLVSEFLLLGLSGYPKIEIVYFALILVMYLVILIGNGVLIIASIFDSHFHTPMYFFLGNLSFLDICYTSSSVPSTLVSLISKKRNISFSGCAVQMFFGFAMGSTECLLLGMMAFDRYVAICNPLRYPIILSKVAYVLMASVSWLSGGINSAVQTLLAMRLPFCGNNIINHFACEILAVLKLACADISLNIITMVISNMAFLVLPLMVIFFSYMFILYTILQMNSATGRRKAFSTCSAHLTVVIIFYGTIFFMYAKPKSQDLIGEEKLISLFYGVVTPMLNPILYSLRNKDVKAAVKYLLNKKPIH

SEQ ID NO: 818 - protein, 315 aa, Artificial Sequence
  Synthetic
HVRSSFDFNQTLVSEFLLLGLSGYPKIEIVYFALILVMYLVILIGNGVLIIASIFDSHFHTPMYFFLGNLSFLDICYTSSSVPSTLVSLISKKRNISFSGCAVQMFFGFAMGSTECLLLGMMAFDRYVAICNPLRYPIILSKVAYVLMASVSWLSGGINSAVQTLLAMRLPFCGNNIINHFACEILAVLKLACADISLNIITMVISNMAFLVLPLMVIFFSYMFILYTILQMNSATGRRKAFSTCSAHLTVVIIFYGTIFFMYAKPKSQDLIGEEKLISLFYGVVTPMLNPILYSLRNKDVKAAVKYLLNKKPIH

SEQ ID NO: 819 - protein, 311 aa, Artificial Sequence
  Synthetic
MDKNNQTFVSEFLLLGLAGYPKTEIIYFVIVLVMYLVILTGNGVLIIASIFDSRLHTPMYFFLGNLSFLDICYTTSSVPSTLVSLISKKRNISFSGCAVQMFFGFAMGSTECLLLGMMAFDRYVAICNPLRYSIIMSKEVYVFMASASWFSGSINSVVQTSLAMRLPFCGNNVINHFTCEVLAVLKLACADISLNIITMVISNMAFLVLPLLVIFFSYLFILHTILRMNSATGRRKAFSTCSAHLTVVIIFYGTIFSMYAKPKSQDLTGQDKIISLFYGVVTPMLNPIIYSLRNKDVKAAVKYILKQKYVP

SEQ ID NO: 820 - protein, 312 aa, Artificial Sequence
  Synthetic
MDKINQTFVREFILLGLSGYPKLEIIFFALILVMYVVILIGNGVLIIASILDSRLHMPMYFFLGNLSFLDICYTTSSIPSTLVSLISKKRNISFSGCAVQMFFGFAMGSTECFLLGMMAFDRYVAICNPLRYPIIMNKVVYVLLTSVSWLSGGINSTVQTSLAMRWPFCGNNIINHFLCEILAVLKLACSDISVNIVTLAVSNIAFLVLPLLVIFFSYMFILYTILRTNSATGRHKAFSTCSAHLTVVIIFYGTIFFMYAKPKSQDLLGKDNLVSMFYGVVTPMLNPIIYSLRNKDVKAAIKYLLSRKAINQ

SEQ ID NO: 821 - protein, 312 aa, Artificial Sequence; identical to SEQ ID NO: 820
  Synthetic

SEQ ID NO: 822 - protein, 312 aa, Artificial Sequence
  Synthetic
MEWENHTILVEFFLKGLSGHPRLELLFFVLIFIMYVVILLGNGTLILISILDPHLHTPMYFFLGNLSFLDICYTTTSIPSTLVSFLSERKTISLSGCAVQMFLGLAMGTTECVLLGMMAFDRYVAICNPLRYPIIMSKDAYVPMAAGSWIIGAVNSAVQSVFVVQLPFCRNNIINHFTCEILAVMKLACADISDNEFIMLVATTLFILTPLLLIIVSYTLIIVSIFKISSSEGRSKASSTCSAHLTVVIIFYGTILFMYMKPKSKETLNSDDIISMFYGVMTPMMNPLIYSLRNKDVKEAVKHLLNRRFFSK

SEQ ID NO: 823 - protein, 312 aa, Artificial Sequence
  Synthetic
MEWENHTILVEFFLKGLSGHPRLELLFFVLIFIMYVVILLGNGTLILISILDPHLHTPMYFFLGNLSFLDICYTTTSIPSTLVSFLSERKTISLSGCAVQMFLSLAMGTTECVLLGVMAFDRYVAICNPLRYPIIMSKDAYVPMAAGSWIIGAVNSAVQTVFVVQLPFCRNNIINHFTCEILAVMKLACADISGNEFILLVTTTLFLLTPLLLIIVSYTLIILSIFKISSSEGRSKPSSTCSARLTVVITFCGTIFLMYMKPKSQETLNSDDLIFIFYRVMTPMMNPLIYSLRNKDVKEAVKHLLRRKNFNK

SEQ ID NO: 824 - protein, 312 aa, Artificial Sequence
  Synthetic
MEWENQTILVEFFLKGHSVHPRLELLFFVLIFIMYVVILLGNGTLILISILDPHLHTPMYFFLGNLSFLDICYTTTSIPSTLVSFLSERKTISFSGCAVQMFLGLAMGTTECVLLGMMAFDRYVAICNPLRYPIIMSKNAYVPMAVGSWFAGIVNSAVQTTFVVQLPFCRKNVINHFSCEILAVMKLACADISGNEFLMLVATILFTLMPLLLIVISYSLIISSILKIHSSEGRSKAFSTCSAHLTVVIIFYGTILFMYMKPKSKETLNSDDIISMFYGVMTPMMNPLIYSLRNKDVKEAVKHLPNRRFFSK

SEQ ID NO: 825 - protein, 312 aa, Artificial Sequence
  Synthetic
MEWENQTILVEFFLKGHSVHPRLELLFFVLIFIMYVVILLGNGTLILISILDPHLHTPMYFFLGNLSFLDICYTTTSIPSTLVSFLSERKTISFSGCAVQMFLGLAMGTTECVLLGMMAFDRYVAICNPLRYPIIMSKNAYVPMAVGSWFAGIVNSAVQTTFVVQLPFCRKNVINHFSCEILAVMKLACADISGNELLMLVATILFTLMPLLLIVISYSLIISSILKIHSSEGRSKAFSTCSAHLTVVIIFYGTILFMYMKPKSKETLNSDDIISMFYGVMTPMMNPLIYSLRNKDVKEAVKHLPNRRFFSK

SEQ ID NO: 826 - protein, 314 aa, Artificial Sequence
  Synthetic
MAGTNHTEVIEYVLLGLQDHHGLEIALFVLCLGIYCMTLLGNSFLVGLIVLDTHLHSPMYFFISNLSLIDICGTSSFTPMMLLNFLDVQRTISFPSCALQMYLTLALGTTECLLLAVMAYDRYVAICQPLRYPELVNGPLCIQMAGISWGTGFANSLLHSILVWHLPFCGHYIINHFFCEILAVLKLACGDISLNALILTVATAVLTMTPLLLICLSYIFILAAILRVPSAAGRSKAFSTCSAHLTVVVIFYGTITFMYLKPKDQDPSVGKIITLLYAIVAPSLNAFIYSLRNSEVKAAVTALLWLLTRKMSHF

SEQ ID NO: 827 - protein, 312 aa, Artificial Sequence
  Synthetic
MEPLNRTEVSEFFLKGFSGYPALEHLLFPLCSAMYLVTLLGNTAIMAVSVLDIHLHTPVYFFLGNLSTLDICYTPTFVPLMLVHLLSSRKTISFAVCAIQMCLSLSTGSTECLLLAITAYDRYLAICQPLRYHVLMSHRLCVLLMGAAWVLCLLKSVTEMVISMRLPFCGHHVVSHFTCKILAVLKLACGNTSVSEDFLLAGSILLLPVPLAFICLSYLLILATILRVPSAARCCKAFSTCLAHLAVVLLFYGTIIFMYLKPKSKEAHISDEVFTVLYAMVTTMLNPTIYSLRNKEVKEAARKVWGRSRASR

SEQ ID NO: 828 - protein, 312 aa, Artificial Sequence [sequence omitted]

SEQ ID NO: 829 - protein, 312 aa, Artificial Sequence
  Synthetic
MEPSNRTAVSEFVLKGFSGYPALERLLFPLCSVMYLVTLLGNTAIVAVSMLDARLHTPMYFFLGNLSILDICYTSTFVPLMLVHLLSSRKTISFTGCAVQMCLSLSTGSTECLLLAVMAYDRYLAICQPLRYPVLMSHRLCLMLAGASWVLCLFKSVAETVIAMRLPFCGHHVIRHFTCEILAVLKLTCGDTSVSDAFLLVGAILLLPIPLTLICLSYMLILATILRVPSATGRSKAFSTCSAHLAVVLLFYSTIIFMYMKPKSKEARISDQVFTVLYAVVTPMLNPIIYSLRNKEVKEAARKAWGSRWACR

SEQ ID NO: 830 - protein, 318 aa, Artificial Sequence
  Synthetic
MNWVNKSVPQEFILLVFSDQPWLEIPPFVMFLFSYILTIFGNLTIILVSHVDFKLHTPMYFFLSNLSLLDLCYTTSTVPQMLVNICNTRKVISYGGCVAQLFIFLALGSTECLLLAVMCFDRFVAICRPLHYSIIMHQRLCFQLAAASWISGFSNSVLQSTWTLKMPLCGHKEVDHFFCEVPALLKLSCVDTTANEAELFFISVLFLLIPVTLILISYAFIVQAVLRIQSAEGQRKAFGTCGSHLIVVSLFYGTAISMYLQPPSPSSKDRGKMVSLFCGIIAPMLNPLIYTLRNKEVKEAFKRLVAKLNQEIRNMQMI

SEQ ID NO: 831 - protein, 319 aa, Artificial Sequence
  Synthetic
MNWVNKSVPQEFILLVFSDQPWLEIPPFVMFLFSYILTIFGNLTIILVSHVDFKLHTPMYFFLSNLSLLDLCYTTSTVPQMLVNICNTRKVISYGGCVAQLFIFLALGSTECLLLAVMCFDRFVAICRPLHYSIIMHQRLCFQLAAASWISGFSNSVLQSTWTLKMPLCGHKEVDHFFCEVPALLKLSCVDTTANEAELFFISVLFLLIPVTLILISYAFIVQAVLRIQSAEGQRKAFGTCGSHLIVVSLFYGTAISMYLQPPSPSSKDRGKMVSLFCGIIAPMLNPLIYTLRNKEVKEAFKRLVAKSLLNQEIRNMQM

SEQ ID NO: 832 - protein, 313 aa, Artificial Sequence
  Synthetic
MSVANESISREFILLGFSDRPWLELPLFVVFLVSYILTIFGNMMIILVSRLDSKLHTPMYFFLTNLSLLDLCYTTSTVPQMLINICSTRKVISYGGCVAQLFIFLALGSTECFLLGVMSFDRFVAICRPLHYSVIMHQRRCLQLAAACWISGFSNSVLQSTWTLQMPLCGHKEVDHFFCEVPALLKLSCVDTTANEAELFFISVLFLLIPVTLILISYAFIVQAVLRIRSAEGRRKAFGTCGSHLIVVVLFYGTAIYMYLQPPSPTSKDRGKMVSLFYGIITPMLNPLIYTLRNKEVKGAFKRLVTRIILSRK

SEQ ID NO: 833 - protein, 313 aa, Artificial Sequence
  Synthetic
MSVANESISREFILLGFSDRPWLELPLFVVFLVSYILTIFGNMMIILVSRLDSKLHTPMYFFLTNLSLLDLCYTTSTVPQMLINICSTRKVISYGGCVAQLFIFLALGCTECFLLGVMSFDRFVAICRPLHYSVIMHQRRCLQLAAACWISGFSNSVLQSTWTLQMPLCGHKEVDHFFCEVPALLKLSCVDTTANEAELFFISVLFLLIPVTLILISYAFIVQAVLRIRSAEGRRKAFGTCGSHLIVVVLFYGTAIYMYLQPPSPTSKDRGKMVSLFYGIITPMLNPLIYTLRNKEVKGAFKRLVTRIILSRK

SEQ ID NO: 834 - protein, 313 aa, Artificial Sequence
  Synthetic
MNWVNDSIIQEFILLGFSDRPWLEFPLLVVFLISYTVTIFGNLTIILVSRLDTKLHTPMYFFLTNLSLLDLCYTTCTVPQMLVNLCSIRKVISYRGCVAQLFIFLALGATEYLLLAVMSFDRFVAICRPLHYSVIMHQRLCLQLAAASWVTGFSNSVWLSTLTLQLPLCDPYVIDHFLCEVPALLKLSCVETTANEAELFLVSELFHLIPLTLILISYAFIVRAVLRIQSAEGRQKAFGTCGSHLIVVSLFYSTAVSVYLQPPSPSSKDQGKMVSLFYGIIAPMLNPLIYTLRNKEVKEGFKRLVARVFLIKK

SEQ ID NO: 835 - protein, 313 aa, Artificial Sequence
  Synthetic
MSWANESITGEFVLLGFSDQPWLEFPLFVVFLTSYIVTIFGNLNIILVSHLDPKLHTPMYFFLTNLSVIDLCYITCTVPQMLVNLRSIRKVISFGGCVVQLFMFLALGATECVLLPVMSFDRFVAICRPLHYSVIMHQRLCLQLAAVSWIIGFGNSVWLSILTLQLPRCGHYVIDHFLCEVPALLKLSCVDVTANEAELFFVSVFFHLTPLSLILTSYAFIARAILKIQSAEGRQKAFGTCSSHLIVVSLFYGTALSVYFLPPSPHSKNRRKMVPLFYGIIAPMLNPLIYTLRNKEVKDAFKRLIKRVFLSKN

SEQ ID NO: 836 - protein, 313 aa, Artificial Sequence
  Synthetic
MNWENESSPKEFILLGFSDRAWLQMPLFVVLLISYTITIFGNVSIMMVCILDPKLHTPMYFFLTNLSILDLCYTTTTVPHMLVNIGCNKKTISYAGCVAHLIIFLALGATECLLLAVMSFDRYVAVCRPLHYVVIMNYWFCLRMAAFSWLIGFGNSVLQSSLTLNMPRCGHQEVDHFFCEVPALLKLSCADTKPIEAELFFFSVLILLIPVTLILISYGFIAQAVLKIRSAEGRQKAFGTCGSHMIVVSLFYGTAIYMYLQPPSSTSKDWGKMVSLFYGIITSMLNSLIYSLRNKDMKEAFKRLMPRIFFCKK

SEQ ID NO: 837 - protein, 313 aa, Artificial Sequence; identical to SEQ ID NO: 836
  Synthetic

SEQ ID NO: 838 - protein, 315 aa, Artificial Sequence
  Synthetic
MWINNQSSVDDFILLGFSDRPWLETPLFVIFLVAYIFALFGNISIILVSRLDPQLDSPMYFFVSNLSLLDLCYTTSTVPQMLVNLRGPEKTISYGGCVAQLYIFLALGSTECILLAIMAFDRFAAICRPLHYPIIMNQKRCIHMATGTWISGFANSLVQSTLTVVAPRCGQRVIDHFFCEVPALLKLACTDTSVNEAELNVLGALLLLVPLSLILGTYVFIAQAVLKLRSAESRRKAFNTCASHLLVVSLFYFTAISMYVQPPSSYSHERGKIMALFYGIVTPTLNPFIYTLRNKDVKAALRRALTKEFWVKARQ

SEQ ID NO: 839 - protein, 310 aa, Artificial Sequence
  Synthetic
MNDDGKVNASSEGYFILVGFSNWPHLEVVIFVVVLIFYLMTLIGNLFIIILSYLDSHLHTPMYFFLSNLSFLDLCYTTSSIPQLLVNLWGPEKTISYAGCMIQLYFVLALGTTECVLLVVMSYDRYAAVCRPLHYTVLMHPRFCHLLAVASWVSGFTNSALHSSFTFWVPLCGHRQVDHFFCEVPALLRLSCVDTHVNELTLMITSSIFVLIPLILILTSYGAIVRAVLRMQSTTGLQKVFGTCGAHLMAVSLFFIPAMCIYLQPPSGNSQDQGKFIALFYTVVTPSLNPLIYTLRNKVVRGAVKRLMGW

SEQ ID NO: 840 - protein, 312 aa, Artificial Sequence
  Synthetic
MMIKKNASSEDFFILLGFSNWPQLEVVLFVVILIFYLMTLTGNLFIIILSYVDSHLHTPMYFFLSNLSFLDLCHTTSSIPQLLVNLRGPEKTISYAGCMVQLYFVLALGIAECVLLVVMSYDRYVAVCRPLHYTVLMHPRFCHLLAAASWVIGFTISALHSSFTFWVPLCGHRLVDHFFCEVPALLRLSCVDTHANELTLMVMSSIFVLIPLILILTAYGAIARAVLSMQSTTGLQKVFRTCGAHLMVVSLFFIPVMCMYLQPPSENSPDQGKFIALFYTVVTPSLNPLIYTLRNKHVKGAAKRLLGWEWGK

SEQ ID NO: 841 - protein, 312 aa, Artificial Sequence
  Synthetic
MMIKKNASSEDFFILLGFSNWPQLEVVLFVVILIFYLMTLTGNLFIIILSYVDSHLHTPMYFFLSNLSFLDLCYTTSSIPQLLVNLRGPEKTISYAGCMVQLYFVLALGIAECVLLVVMSYDRYVAVCRPLHYTVLMHPRFCHLLVAASWVIGFTISALHSSFTFWVPLCGHRLVDHFFCEVPALLRLSCVDTHANELTLMVMSSIFVLIPLILILTTYGAIARAVLSMQSTTGLQKVFRTCGAHLMVVSLFFIPVMCMYLQPPSENSPDQGKFIALFYTVVTPSLNPLIYTLRNKHVKGAAKRLLGWEWGK

SEQ ID NO: 842 - protein, 312 aa, Artificial Sequence
  Synthetic
MVENFNASWEGYFIFLGFSKWPHLEVVLFVVILIFYMMTLMGNLFIIILSHLDSHLHTPMYFFLSNLSALDLCYTTSSVPQLLFNLWGPKKTISYAGCMLQLYFVLALGTTECVLLVVMSYDRYVAVCKPLHYSVLMNPRFCQLLAAASWVCGFTTSALHSSFTFWVPLCGHRKVDHFFCEVPALLQLSCVDIHANEMTLMVMSAIFVVIPLILILSSYAAIAWTVLEMQSTTRLQKVFGTCGAHLTVVSLFFIPIMCIYLQPSTKSSQDHAKFIALFYTVVTPSLNPLIYTLRNKDVRGAIRRLSRYEREK

SEQ ID NO: 843 - protein, 311 aa, Artificial Sequence
  Synthetic
MGTFNTSLGGGFILVGFSDWPALELIFFIHILIFYSITLFGNTAIIALSRTDLRLHTPMYFFLSHLSFLDLCFTTSTVPQLLINLHGQDRTISYGGCVAQLFIFLALGSTESVLLVVMAFDRYVAVCRPLHYTTIMHPVLCQALAIASWVGGFLNSLIQTGLMMAMPLCGHRLNHFFCEMPVFLKLACQDTGGTEAKMFVARVVIVAVPAMLILGSYAQIARAVLKVKSVAARRKAAGTCGSHLLVVSLFYGSATYTYLQPKDSYSESKGKFVALFYTIITPMFNPLIYTLRNKDMKGALWKVLGRAAATG

SEQ ID NO: 844 - protein, 311 aa, Artificial Sequence
  Synthetic
MGTFNISLGGGFILVGFSDWPALELIFFIHILIFYSITLFGNTAIIALSRTDLRLHTPMYFFLSHLSFLDLCFTTSTVPQLLINLHGQDRTISYGGCVAQVFIFLALGSTESVLLVVMAFDRYAAVCRPLHYTTIMHPVLCQALAIASWVGGFLNSLIQTGLMMAMPLCGHRLNHFFCEMPVFLKLVCEDTGGTEAKMFVARAVIVAVPTMLILGSYAQIARAVLKVKSVTARRKAAGTCGSHLLVVSLFYGSAIYTYLQPKDSYSESKGKFVALFYTIITPMLNPLIYTLRNKDMKGALWKVLGRATVTG

SEQ ID NO: 845 - protein, 311 aa, Artificial Sequence
  Synthetic
MESFNISLGKGFILVGFSDWPALELIFFIYILIFYSLTLFGNTAIIALSRMDLQLHTPMYYFLCHLSFLDLCFTTSTVPQLLINLHGQDRTISYGGCVSQLFITLALGSTESVLLVVMAFDRYAAVCRPLHYMNIMHPVLCQALAIASWVGGFLNSLIQTGLMMAMPLCGHRLNHFFCEMPVFLKLACQDTGGTEAKMFVARAVIVAVPAMLILGSYAQIARAVLKVKSVAARRKAAGTCGSHLLVVSLFYGSATYTYLQPKDSYSESKGKFVALFYTIITPMFNPLIYTLRNKDMKGALWKVLGRAAATG

SEQ ID NO: 846 - protein, 309 aa, Artificial Sequence
  Synthetic
MDSFNATLEERFFLVGFSDWPQLELILFVFISIVYSLTIFGNTTIIALSRIDLRLHTPMYFFLSNLSFLDLCFTTSTVPQLLINLYGQDRTISYGGCVAQLFIYLALGSTECVLLVVMAFDRYAAVCRPLHYTTIMHPLLCQALALASWVGGFLNSLIQTGLMMTMPLCGHRLNHFFCEMPVFLKLACQDTGGTEAKMFVARAIILVFPATLILGSYGHIAKAVLKVKSTAGRRKAFGTCGSHLLVVSLFYGSAIYTYLQPKSSYSESKGKFVALFYTIVTPMLNPLIYTLRNKDVKGALWKVLGRGTD

SEQ ID NO: 847 - protein, 309 aa, Artificial Sequence
  Synthetic
MDSFNATLEERFFLVGFLDWPQLELILFVFISIFYSLTIFGNTAIIALSQMDLRLHTPMYYFLSHLSFLDLCYTTSTVPQLLINLHGLDRTISYGGCVAQLFISLALGSTECVLLVVMAFDRYAAVCRPLHYMTIMHPLLCQALALASWVGGFLNSLIQTGLMMAMPLCGHRLNHFFCEMPVFLKLACQDTGGTEAKMFVARAIILVFPATLILGSYGHIAKAVLKVKSTAGRRKAFGTCGSHLLVVSLFYGSAIYTYLQPKSSYSESDGKFVALFYTIVTPMLNPLIYTLRNKDVKGALWKVLGRGTD

SEQ ID NO: 848 - protein, 311 aa, Artificial Sequence
  Synthetic
MGSFNASLGKGFILVGFSDWPQLELILFIYVLIFYSLTLFGNTTIIALSQLDIRLHTPMYFFLSHLSFLDLCYTTSTVPQLLINIAAQDHTITYGRCVAQLFSVLALGSTESMLLVVMAFDRYAAVCRPLHYTTIMHPLLCQALAISSWVAGLVNSLIQTGLMMAMPLCRYRLNHFFCEMPVFLKLACKDTAGTEAKMFVARAIILVFPATLILGSYAHIARAVLKVKSTSGRRKAFGTCGSHLLVVSMFYGSTIYTYLQPNDSYSENEGKFVALFYTIVTPMLNPLIYTLRNKDVKGALWKVLGRGTDSR

SEQ ID NO: 849 - protein, 311 aa, Artificial Sequence
  Synthetic
MGSFNTSFEDGFILVGFSDWPQLEPILFVFIFIFYSLTLFGNTIIIALSWLDLRLHTPMYFFLSHLSLLDLCFTTSTVPQLLINLCGVDRTITRGGCVAQLFIYLALGSTECVLLVVMAFDRYAAVCRPLHYMAIMHPHLCQTLAIASWGAGFVNSLIQTGLAMAMPLCGHRLNHFFCEMPVFLKLACADTEGTEAKMFVARVIVVAVPAALILGSYVHIAHAVLRVKSTAGRRKAFGTCGSHLLVVFLFYGSAIYTYLQSIHNYSEREGKFVALFYTIITPILNPLIYTLRNKDVKGALWKVLWRGRDSG

SEQ ID NO: 850 - protein, 311 aa, Artificial Sequence [sequence omitted]

SEQ ID NO: 851 - protein, 311 aa, Artificial Sequence
  Synthetic
MGTFNASLGKGFILVGFSDFPQLEVFLFVFILVFYLLTLLGNTTIIALSRLDVRLHTPMYFFLSHLSFLDLCYTTSTVPQLLINLCGLDRTISYGGCVAQLLIFLALVSTECLLLGVMAFDRYAAVCRPLHYTTIMHPQLCQGLAISSWVSGLVNSVIQTGLVMAMPLCSHRLNHFFCEMPIFLKLACEDTNGTEVKMFVARTIILIFPAALILGSYGHIARAILRIKSMAGRRKAFGTCGSHLIVVSLFYGSGIYTYLQPIHRYSENEGKFVAVFYTILTPILNPLIYTLRNKDVKGALWKVLGKGTDLV

SEQ ID NO: 852 - protein, 311 aa, Artificial Sequence; identical to SEQ ID NO: 851
  Synthetic

SEQ ID NO: 853 - protein, 311 aa, Artificial Sequence
  Synthetic
MGNFNTSTQESFILVGFSDWPQLQAFLFVIILIFYSLTIFGNTTIIVLARLDLRLHKPMYFFLSHLSFLDLCYTTSTVPQLLINLRGLDRTISYGGCVAQLFIFLALASTECLILVAMAFDRYAAVCHPLHYTSIMNPILCRALAISSWVGGLVNSLIQTGLVMAMRLCGHQINHFFCEMPIFLKLACEDTEGTEAKMFVARTIVLVCPAVLILGSYVHIAKAVLKVKSMAGRRKAFGTCGSHLMVVSLFYGSGIYTYLQPVHRYSESKGKFVALFYTIVTPMFNPLIYTLRNKDVKGALWKLLGRGTDSG

SEQ ID NO: 854 - protein, 311 aa, Artificial Sequence
  Synthetic
MGTFNFSSDRAFFLVGFSDWPHLELVFFVAISIFYSLTLFGNSSIIALSRLDLRLQTPMYFFLCHLSFLDLCYTTSTVPQLLINLHGQDRTISYERCVAQLLIFLALASTECVLLGVMAFDRYAAVCRPLHYTTIMHPQLCHTLAISSWVGGLVNSLTQTGLMMVMPLCGYRLNHFFCEMPIFLKLACEETKRTEAKMFVARTIVLVCPAALILGSYAHITRAVLKVKSTAGRRKAFGTCGSHILVVSLFYGSAIYTYLQPTHTYSESEGKFVALFYTIITPMLNPLIYTLRNKDVKGALWKVLGRGTDSE

SEQ ID NO: 855 - protein, 311 aa, Artificial Sequence
  Synthetic
MGSFNTSFRQGFFLVGFSDFPQLELLLSVLISIFYSLTLFGNSTIIILSQLDARLQMPMYFFLCHLSFLDLCYTTSIVPQLLINLQGYDRTISYGGCVAQLFLFLALATTESVLLVVMAFDRYVAVCRPLHYTTIMHPVLCLSLAIVSWVGGFMNSLIQTSLMMAVPLCGHRLNHFFCEIPSLLKLACEDTEGTGAKMFVVRVVFLIFPITLILSSYANIAQAVLKTKSMAGCKKALGTCGSHLVVVSMFYGAAMYTYLQPKGTYSESKGKFVALFYIIVTPMLNPLIYTLRNKDVKGALWKVLGRATDLG

SEQ ID NO: 856 - protein, 311 aa, Artificial Sequence
  Synthetic
MEYLNTSSEEGFILVGFSDWPHLEPTLFAFISIFYSLTLFGNTVIIILSRLDLRLHTPMYYFLCHLSFLDLCYTTSTVPQLLVNLSGLDRTISFGRCVAQLCIVLSLGGTECVLLVTMAIDRYAAVCRPLHYTTIMHPVLCRALVVFSWVGGLVNSLIQTSLVMAMPLCGHQLNHFFCELPVLLKMACEDTGGTEVNLFVARVIILVCPLLLILGSYAHIARAVLNIRSMAGRRKAFGTCASHLIVVAMFYGSAISTYLQPVHRYSEKEGKFLALFYTIITPMLNPLIYTLRNKDVKGALWKVLGRGTDSR

SEQ ID NO: 857 - protein, 311 aa, Artificial Sequence
  Synthetic
MDYLNTSSEEGFILVGFSDWPHLEPTLFAFISIFYSLTLFGNTVIIILSRLDLRLHTLMYYFLCHLSFLDLCYTASTVPQLLVNLSGLDRTISFGRCVAQLCIVLSLGGTECVLLVTMAIDRYAAVCRPLHYTTIMHPVLCRALVVFSWVGGLVNSLIQTSLVMAMPLCGHQLNHFFCELPVLLKMACEDTGGTEVNLFVARVIILVCPLLLILGSYAHIARAVLNIRSVAGRRKAFGTCASHLIVVAMFYGSAISTYLQPVHRYSEKEGKFLALFYTVITPMLNPLIYTLRNKDVKGALWKVLGRGTDSR

SEQ ID NO: 858 - protein, 311 aa, Artificial Sequence
  Synthetic
MEYLNTSSEEGFILVGFSDWPHVVPILFAFISIFYSLTLFGNTVIIILSQLDLRLHTPMYYFLCHLSFLDLCYTASTVPQLLVNLSGLDRTISFGRCVAQLCIVLSLGGTECVLLVTMAIDRYAAVCHPLHYTTIMHPVLCRALVVFSWVGGLVNSLIQTSFVMAMPLCGHQLNHFFCELPVLLKMACEDTGGTEVNLFVARVIILVCPLLLILGSYAHIARAVLNIRSMAGRRKAFGTCASHLIVVAMFYGSAISTYLQPVHRYSEKEGKFLALFYTIITPMLNPLIYTLRNKDVKGALWKVLGRGTDSA

SEQ ID NO: 859 - protein, 311 aa, Artificial Sequence
  Synthetic
MENLNTSSEEGFILVVFSDWPHLEPILFAFISIFYSLTLFGNTVIIILSQLDLCLHTPMYYFLCHLSFLDLCYTASTVPQLLVNLSGLDRTISFGRCVAQLCIVLSLGGTECVLLVAMAIDRYAAVCRPLHYTTIMHPVLCRALVVFSWVGGLVNSLIQTSLVMAMPLCGHQLNHFFCELPVLLKMACEDTGGTEVNLFVARVIILVCPLLLILGSYAHIARAVLNIRSMAGRRKAFGTCASHLIVVAMFYGSGISTYLQPVHRYSEKEGKFLALFYTIITPMLNPLIYTLRNKDVKGALWKVLGRSTDSA

SEQ ID NO: 860 - protein, 311 aa, Artificial Sequence
  Synthetic
MDYLNTSSEEGFILVGFSDWPHLEPILFAFISMFYSLTLFGNTVIIILSQLDLRLHTPMYYFLCHLSFLDLCYTASTVPQLLVNLSGLDRTISFGRCVAQLFIMLSLGGIECVLLVAMAIDRYAAVCRPLHYTTIMHPVLCRALVVFSWVGGLVNSLIQTSLVMTMPLCGHQLNHFFCELPVLLKMACEDTGGTEVNLFVARVIILVCPLLLILGSYAHIARAVLNIRSMAGRRKAFGTCASHLIVVAMFYGSAISTYLQPVHRYSDSEGKFVALFYTVITPMLNPLIYTLRNKDVKGALWKVLGRGTDSR

SEQ ID NO: 861 - protein, 316 aa, Artificial Sequence
  Synthetic
MGSFNLSLEGFLLVGFSDWPQLELILLVFISIFYSLTLCGNITIIVLTQQDLHLHTPMYFFLAHLSFLDLCFTSSTVPKLLISLSRGDQTISYAGCMTQFFIALLLGGTECVLLVVMAFDRYVAVCRPLHYTSIMHPLLCHALAISSWVGGLVNSLTQTSLIMTIPLCGHHLNHFFCEMLVLLKLACEDTVGTETYLFWAGAVILVCPVALILGTYAHIAHAVLKIKSRSGRRKALGTCGSHLTVVFLFYGSAMYTYLQPIHTYSGSEGKFAALFYTIITPMLNPLIYTLRNKDVKGALCKVLVKKETKTRRKMVE

SEQ ID NO: 862 - protein, 311 aa, Artificial Sequence
  Synthetic
MSSFNTTLKGGFILMGFSDWPQLEHIFFVFISMFYILTIFGNFTIITISRMDQRLQTPMYFFLNNLSFLDLCYTTSIVPQLLVNISGIDKTMSYAGCMTQFFIVLLLGGTECMLLVVMAFDRYVAVCHPLHYTSIMHPLLCHALAISSWVGGLVNSLTQTSLIMTIPLCGHHLNHFFCEMLVLLKLACEDTGGTEANLFVAGAVILVCPVALILGTYAHIAHAVLKIKSRSGRRKALGTCGSHLTVVFLFYGSAMYTYLQPVHVYSGSEGKFAALFYTIITPMLNPLIYTLRNKDVKGALCKVLGRDTSTT

SEQ ID NO: 863 - protein, 317 aa, Artificial Sequence
  Synthetic
MSSFNTALEGGFILMGFSDWPHLEHIFFVFISMFYFLTIFGNFTIITISRMDRRLQTPMYFFLNNLSFLDLCYNTSIVPQLLVNISGIDKTMSYAGCMTQFFIVLLLGGTECMLLVVMAFDRYVAVCHPLHYTSIMHPLLCHALAISSWVGGLVNSLTQTSLIMTIPLCGHHLNHFFCEMLVLLKLACEDTVGTEANLFVAGAIILVCPVALILGTYAHIAHAVLKIKSRSGRRKALGTCGSHLTVVFLFYGSAMYMYLQPVHVYSGSEGKFAALFYTIITPMMNPDLYPKKQECEGGFVQNIGREQNFIQILSNIS

SEQ ID NO: 864 - protein, 309 aa, Artificial Sequence
  Synthetic
MDQKNGSSFTGFILLGFSDRPQLELVLFVVLLIFYIFTLLGNKTIIVLSHLDPHLHNPMYFFFSNLSFLDLCYTTGIVPQLLVNLRGADKSISYGGCVVQLYISLGLGSTECVLLGVMAFDRYAAVCRPLHYTVVMHPCLYVLMASTSWVIGFANSLLQTVLILLLTLCGRNKLEHFLCEVPPLLKLACVDTTMNESELFFVSVIILLVPVALIIFSYSQIVRAVVRIKSATGQRKVFGTCGSHLTVVSLFYGTAIYAYLQPGNNYSQDQGKFISLFYTIITPMINPLIYTLRNKDVKGALKKVLWKNY

SEQ ID NO: 865 - protein, 312 aa, Artificial Sequence
  Synthetic
MRRLNTTPHHTNGFILVGFSEWPRLEMALLVVISIFYILTLLGNSAIIILSRLDPKLHTPMYFFLANLSFLDLCYTTSTVPQMLKNIQSHERSITYVGCIAQLFIFLSLGSTECVLLSVMAFDRYVAICQPLRYTVIMHPQLCQQLAAVAWITGFSNSLVQTVLTSLLPRCGQYQIENFFCEVPAMLQLSCVDTWVNEVEMYAAVVVIKVIPLGLILFSYINIVRAVIKIQSSEGRKKAFNTCGSHLLVVIMFYGSAIYAYMAPKSSSAKLKGKLLALFYGLITPMLNPLIYTLRNKDVKAAVKKVLGREQE

SEQ ID NO: 866 - protein, 316 aa, Artificial Sequence
  Synthetic
MEIANVSSPEVFVLLGFSTRPSLETVLFIVVLSFYMVSILGNGIIILVSHTDVHLHTPMYFFLANLPFLDMSFTTSIVPQLLANLWGPQKTISYGGCVVQFYISHWLGATECVLLATMSYDRYAAICRPLHYTVIMHPQLCLGLALASWLGGLTTSMVGSTLTMLLPLCGNNCIDHFFCEMPLIMQLACVDTSLNEMEMYLASFVFVVLPLGLILVSYGHIARAVLKIRSAEGRRKAFNTCSSHVAVVSLFYGSIIFMYLQPAKSTSHEQGKFIALFYTVVTPALNPLIYTLRNTEVKSALRHVLENGSAGKLAQI

SEQ ID NO: 867 - protein, 316 aa, Artificial Sequence
  Synthetic
WLQVMEKENTSSFEGFILVGFSDRPHLELILFVVVLSFYLLTLLGNMTIILLSALDSRLHTPMYFFLANLSFLDMCFTTGSIPQMLYNLWGPDKTISYVGCAIQLYFVLALGGVECVLLAVMAYDRYAAVCKPLHYTVIMHPRLCGQLASVAWLSGFGNSLIMAPQTLMLPRCGHRRVDHFLCEMPALIGMACVDTMALEALAFALAIFIILAPLILILISYGYIARAVFRIKSAAGRRKAFNTCSSHLIVVSLFYGTIIYMYLQPANTYSQDQGKFLTLFYTIVTPSVNPLIYTLRNKDVKEAVKKVLGKGSIEV

SEQ ID NO: 868 - protein, 308 aa, Artificial Sequence
  Synthetic
MEKSNDSSEYGFILEGFSDRPRLEMVLFIVNFTLYSVAVLGNITIILVCILDPRLHTPMYFFLANLSFLDLCFSTSCIPQMLVNLWGPDKTISYAGCVVQLFSFLSIGSVECILLAVMAYDRYAAVCKPLHYMVIMHPQLCVRLMAVAWGVGLANAIIMSPLAMTLPRCGRRRINHFLCELPALIKMACVDARPVEMLSFTLAILIVLLPLTLILVSYGYIAAAVLRIKSAAGRWKAFNTCSSHLTVVSLFYGSIIYMYMQPGNSSSQDQGKFLTLFYNLVTPMLNPLIYTLRNKEMKGALKKVCGRH

SEQ ID NO: 869 - protein, 323 aa, Artificial Sequence
  Synthetic
GAVEMGATNDSTFSHFILTGFSDRPELERVLFAILLPAYLLTLLGNSTIILVSRLDPHLHTPMYFFLTHLSFLDLSFTSSSIPQLLYNLSGPDKTISYVGCALQLVLFLGLGGVECLLLAVMAYDRFVAICKPLHYMVIMSPRLCVGLVSVAWSCGVANSLAMSPATLSLPRCGHHRVDHFLCEMPALIRMACVNTAVVEGIAFILAIGIVLSPLVFILVSYGYIVRAVLRISSAAGRQKAFNTCGSHLTVVSLFYGNIIYMYMQPGNSSSQDQGKFLTLFYNIVTPLLNPLIYTLRNKEVKGALRRLLLGSRETGKVRASSR

SEQ ID NO: 870 - protein, 323 aa, Artificial Sequence
  Synthetic
GAVEMGATNDSTFSHFILIGFSDRPELERVLFAIILPAYLLTLLGNSIIILVSRLDPHLHTPMYFFLTHLSFLDLSFTSSSIPQLLYNLSGPDKTISYVGCALQLVLFLGLGGVECLLLAVMAYDRFVAVCKPLHYMVIMSPRLCVGLVSVAWSCGVANSLAMSPVTLSLPRCGHRRVDHFLCEMPALIRTACVNTAAVEGTVFVLAIGIVLSPLVFILVSYGYIVRAVLQIRSAAGRQKAFNTCGSHLTVVSLFYGNIIYMYMQPGNSSSQDQGKFLTLFYNIVTPLLNPLIYTLRNKEVKGALRRLLLGSRETGKVRAGSI

SEQ ID NO: 871 - protein, 314 aa, Artificial Sequence
  Synthetic
MDGTNGSTQTHFILLGFSDRPHLERILFVVILIAYLLTLVGNTTIILVSRLDPHLHTPMYFFLAHLSFLDLSFTTSSIPQLLYNLNGCDKTISYMGCAIQLFLFLGLGGVECLLLAVMAYDRCVAICKPLHYMVIMNPRLCRGLVSVTWGCGVANSLAMSPVTLRLPRCGHHEVDHFLREMPALIRMACVSTVAIEGTVFVLAVGVVLSPLVFILLSYSYIVRAVLQIRSASGRQKAFGTCGSHLTVVSLFYGNIIYMYMQPGASSSQDQGMFLMLFYNIVTPLLNPLIYTLRNREVKGALGRLLLGKRELGKE

SEQ ID NO: 872 - protein, 312 aa, Artificial Sequence
  Synthetic
ALTINAMINQSCQEQFILLGFSDRPRLESILFVFVLIFYLVTLVGNIIIILVSYLDPCLHTPMYFFLTNLSFLDLCFTTSSIPQLLFNLGGQDKSISYIGCAVQLFMFLGLGGTECVLLAVMAYDRFTAICKPLHYSVIMHSQLCWTLVSVAWSVGLLNSLVMSPVTMKLPRCGRCQVRHFLCEMPALIKIACVDTVAVESTVFILSVIIVLVPLTLILISYSYIALAVMRIKSASGRRKAFNTCGSHLTVVSLFYGNIIYMYMQPGHKASQDQGKFLTLFYNLVTPMLNPVIYTLRNKDVKGALKRLVTTK

SEQ ID NO: 873 - protein, 318 aa, Artificial Sequence
  Synthetic
MDQSNYSSLHGFILLGFSNHPKMEMILSGVVAIFYLITLVGNTAIILASLLDSQLHTPMYFFLRNLSFLDLCFTTSIIPQMLVNLWGPDKTISYVGCIIQLYVYMWLGSVECLLLAVMSYDRFTAICKPLHYFVVMNPHLCLKMIIMIWSISLANSVVLCTLTLNLPTCGNNILDHFLCELPALVKIACVDTTTVEMSVFALGIIIVLTPLILILISYGYIAKAVLRTKSKASQRKAMNTCGSHLTVVSMFYGTIIYMYLQPGNRASKDQGKFLTLFYTVITPSLNPLIYTLRNKDMKDALKKLMRFHHKSTKIKRNC

SEQ ID NO: 874 - protein, 318 aa, Artificial Sequence; identical to SEQ ID NO: 873
  Synthetic

SEQ ID NO: 875 - protein, 317 aa, Artificial Sequence
  Synthetic
MDPSNYSTLHVFILLGFSDHPHLEMILSGVVTFFYIITLVGNTAIILASLLDPHLHTPMYFFLRNLSFLDLCYTTSIVPQMLVNLWGPEKTISSVGCIVQLYVYMWLGSIECLLLAVMSYDRFTAICKPLHYLVIMNPRLCVKMIVMVWGISLANSVILCTLTVNLPRCGHNILDHFLCELPAMVRIACVDTTKVELSVFALGIVIVLTPLILILISYGYIAKTVLNMKSKAGQQKAMNTCGSHLTVVSIFYGSIIYLYLQPGNRASKDQGKFLTLFYTIITPSLNPLIYTLRNRDMKDALKKLMMFYHRFAKIRRN

SEQ ID NO: 876 - protein, 317 aa, Artificial Sequence
  Synthetic
MDPSNYSTLHVFILLGFSDHPHLEMILSGVVTFFYIITLVGNTAIILASLLDPHLHTPMYFFLRNLSFLDLCFTTSIVPQMLVNLWGPEKTISSVGCIVQLYVYMWLGSIECLLLAVMSYDRFTAICKPLHYFVIMNPRLCVKMIVMVWGISLANSVILCTLTVNLPRCGHNILDHFLCELPAMVRIACVDTTTVELSVFALGIVIVLTPLILILISYGYIAKTVLNMKSKAGQQKAMNTCGSHLTVVSIFYGTIIYMYLQPGNRASKDQGKFLTLFYTIITPSLNPLIYTLRNRDMKDALKKLMRFYHRFAEVRRN

SEQ ID NO: 877 - protein, 314 aa, Artificial Sequence
  Synthetic
MEINNKSSETDFILLGFSSRPQLEHIISAVVFVFYIVTLVGNTTIILVSYLDSQLHTPMYFFLSNLSFVDLCYTTSIVPQMLVNLWGPKKSITYGGCVLQFFFALDLGATECLLLAVMAYDRYAAVCQPLHYTVIMHPVLCQKMVLSAWLGGLGSALILCSLTLKLPRCGHREVDNFFCEMPALIKMACVYSRVIEIVVFTLGVIFLLVPLSLILISYAVITQAVMKIKSATRWRKVLNTCGSHLTVVTLFYGTLIYMYMKPQNTISHEEGQFFTLFYTIVTPSLNPLIYTLRNKDVKNAVKRILGMDKHSGKV

SEQ ID NO: 878 - protein, 318 aa, Artificial Sequence
  Synthetic
CLSLGEHTNESNLAGFILLGFSDYAQLQKVLFVLILILYLLTILGNTTIILVSRLEPKLHMPMYFFLSHLSFLYRCFTSSVIPQLLVNLWEPMKTIAYGGCLVHLYNSHALGSTECVLPALMSCDRYVAVCRPLHYTVLMHIHLCMALASMAWLSGIATTLVQSTLTLQLPFCGHRQVDHFICEVPVLIKLACVGTTFNEAELFVASILFLIVPVSFILVSSGYIAHAVLRIKSATGRQKAFGTCFSHLTVVTIFYGTIIFMYLQPAKSRSRDQGKFVSLFYTVVTRMLNPLIYTLRIKEVKGALKKVLAKALGVNIL

SEQ ID NO: 879 - protein, 315 aa, Artificial Sequence [sequence omitted]

SEQ ID NO: 880 - protein, 309 aa, Artificial Sequence
  Synthetic
MGLGNESSLMDFILLGFSDHPRLEAVLFVFVLFFYLLTLVGNFTIIIISYLDPPLHTPMYFFLSNLSLLDICFTTSLAPQTLVNLQRPKKTITYGGCVAQLYISLALGSTECILLADMALDRYIAVCKPLHYVVIMNPRLCQQLASISWLSGLASSLIHATFTLQLPLCGNHRLDHFICEVPALLKLACVDTTVNELVLFVVSVLFVVIPPALISISYGFITQAVLRIKSVEARHKAFSTCSSHLTVVIIFYGTIIYVYLQPSDSYAQDQGKFISLFYTMVTPTLNPIIYTLRNKDMKEALRKLLSGKL

SEQ ID NO: 881 - protein, 314 aa, Artificial Sequence
  Synthetic
PPGGMGLGNESSLMDFILLGFSYHPRLEAVLFVFVLFFYLLTLVGNFTIIIISYLDPPLHTPMYFFLSNLSLLDICFTTSLAPQTLVNLQRPKKTITYGGCVAQLYISLALGSTECILLADMALDRYIAVCKPLHYVVIMNPRLCQQLASISWLSGLASSLIHATFTLQLPLCGNHRLDHFICEVPALLKLACVDTTVNELVLFVVSVLFVVIPPALISISYGFITQAVLRIKSVEARHKAFSTCSSHLTVVIIFYGTIIYVYLQPSDSYAQDQGKFISLFYTMVTPTLNPIIYTLRNKDMKEALRKLLSGKLV

SEQ ID NO: 882 - protein, 317 aa, Artificial Sequence
  Synthetic
MTINKSSGGDFILVGFSDQPQLEKILFVLVLISYLLTLVGNTAIILVSCLDSALQTPMYYFLTNLSFVDICFSTSIVPQLLWNLHGPAKTITATGCAIQLYVSLALGSTECVLLAVMAFDRYAAVCRPLHYATVMHPRLCQSLAGVAWLSGVGNTLIQGTITLRLPRCGNHKIYHFICEVPAMIKLACVDIHANEVQLFMASLVLLLLPLTLILVSYGYIAQALMRLRSALTWGKALGTCGSHMLVVVLFYGTITAIYIQPNSSYAHSQGKFITLLYTVVIPTLNPLIYTLRNKDVKGALKRLVRKNNSTGKKILSR

SEQ ID NO: 883 - protein, 315 aa, Artificial Sequence
  Synthetic
MTINKSSGGDFILVGFSDQPQLEKILFVLVLISYLLTLVGNTAIILVSCLDSALQTPMYYFLTNLSFVDICFSTSIVPQLLWNLHGPAKTITATGCAIQLYVSLALGSTECVLLAVMAFDRYAAVCRPLHYATVMHPRLCQSLAGVAWLSGVGNTLIQGTITLRLPRCGNHKIYHFICEVPAMIKLACVDIHANEVQLFMASLVLLLLPLTLILVSYGYIAQALMRLRSALTWGKALGTCGSHLIVVVLFYGTSTAVYIHPNSSYAQSQGKFITLLYTVVIPTLNPLIYTLRNKDVKGALKRLVRKSTGKKILSR

SEQ ID NO: 884 - protein, 309 aa, Artificial Sequence
  Synthetic
MINSSVSSDFILVGFSDQPQLERRLFIVVLISYLLTLVGNTIIILISSIDSKLKTPMYFFLTHLSFVDICFTTSIVPQLLWNLKGPAKTITAVGCAVQLYVSLTLGSTECILLAVMAFDRYAAVCKPLHYVAVMNPQLCRALAGISWLSGIGNALIQGTITLWLPRCGHLWLHHFFCEVPSMIKLACVDIHANEVQLFVASLVLLLLPLALILTSYGHIAKAVIRIKSSQAWRRALGTCGSHLMVVSLFYGSITAIYIQPNSSYAHTHGKFISLFYTVMTPTLNPLIYTLRNKEVKGALGRLFNRASGV

SEQ ID NO: 885 - protein, 310 aa, Artificial Sequence
  Synthetic
NQSSTPGFLLLGFSEHPGLERTLFVVVFTSYLLTLVGNTLIILLSALDPKLHSPMYFFLSNLSFLDLCFTTSCVPQMLVNLWGPKKTISFLDCSVQIFIFLSLGTTECILLTVMAFDRYVAVCQPLHYATIIHPRLCWQLASVAWVIGLVESVVQTPSTLHLPFCPDRQVDDFVCEVPALIRLSCEDTSYNEIQVAVASVFILVVPLSLILVSYGAITWAVLRINSAKGRRKAFGTCSSHLTVVTLFYSSVIAVYLQPKNPYAQERGKFFGLFYAVGTPSLNPLIYTLRNKEVTRAFRRLLGKEMGLTQS

SEQ ID NO: 886 - protein, 310 aa, Artificial Sequence
  Synthetic
NQSSTPGFLLLGFSEHPGLERTLFVVVFTSYLLTLVGNTLIILLSVLDPKLHSPMYFFLSNLSFLDLCFTTSCVPQMLVNLWGPKKTISFLDCSVQIFIFLSLGTTECILLTVMAFDRYVAVCQPLHYATIIHPRLCWQLASVAWVIGLVESVVQTPSTLHLPFCPDRQVDDFVCEVPALIRLSCEDTSYNEIQVAVASVFILVVPLSLILVSYGAITWAVLRINSAKGRRKAFGTCSSHLTVVTLFYSSVIAVYLQPKNPYAQERGKFFGLFYAVGTPSLNPLIYTLRNKEVTRAFRRLLGKEMGLTQS

SEQ ID NO: 887 - protein, 312 aa, Artificial Sequence
  Synthetic
NQSSTPGFLLLGFSEHPGLERTLFVVVFTSYLLTLVGNTLIILLSALDPKLHSPMYFFLSNLSFLDLCFTTSCVPQMLVNLWGPKKTISFLDCSVQIFIFLSLGTTECILLTVMAFDRYVAVCQPLHYATIIHPRLCWQLASVAWVIGLVESVVQTPSTLHLPFCPDRQVDDFVCEVPALIRLSCEDTSYNEIQVAVASVFILVVPLSLILVSYGAITWAVLRINSAKGRRKAFGTCSSHLTVVTLFYSSVIAVYLQPKNPYAQERGKFFGLFYAVGTPSLNPLIYTLRNKEVTRAFRRLLGKGLTQSGELL

SEQ ID NO: 888 - protein, 314 aa, Artificial Sequence
  Synthetic
NQSSPMGFLLLGFSEHPALERTLFVVVFTSYLLTLVGNTLIILLSVLYPRLHSPMYFFLSDLSFLDLCFTTSCVPQMLVNLWGPKKTISFLGCSVQLFIFLSLGTTECILLTVMAFDRYVAVCQPLHYATIIHPRLCWQLASVAWVMSLVQSIVQTPSTLHLPFCPHQQIDDFLCEVPSLIRLSCGDTSYNEIQLAVSSVIFVVVPLSLILASYGATAQAVLRINSATAWRKAFGTCSSHLTVVTLFYSSVIAVYLQPKNPYAQGRGKFFGLFYAVGTPSLNPLVYTLRNKEIKRALRRLLGKERDSRESWRAA

SEQ ID NO: 889 - protein, 310 aa, Artificial Sequence
  Synthetic
NQSSPVVFFLLGFSDNPQLEKVLFVVVLCSYLLTLLGNTLILLLSTLDPRLHSPMYFFLSNLSFLDLCFTTTCVPQMLFNLWGPAKTISFLGCFVQLFIFMSLGTTECILLTVMAFDRYVAVCQPLHYATKINPHLCRQLAGIAWAIGLVQSIVQTPPTLKLPFCSHRQIDNFLCEVPSLIQLSCGDTTYNEIQMAVASIFIVVVPLSLILVSYGAIARAVLKISSAKGRRKAFGTCSSHLIVVTLFYSSVIAVYLQPKNLYARERGKFFGLFYAVGTPTLNPLVYTLRNKEVKRAFWKLLRKDEDSEES

SEQ ID NO: 890 - protein, 310 aa, Artificial Sequence
  Synthetic
NQSSPVGFLLLGFSEHPQLEKVLFVVVLCSYLLTLLGNTLILLLSTLDPRLHSPMYFFLSNLSFLDLCFTTTCVPQMLFNLWGPAKTISFLGCSVQLFIFLSLGTTECILLTVMSFDRYVAVCQPLHYATVIHPRLCWKLAAVAWMMGLLQSIVQTPPTLKLPFCPHRQIDDFLCEVPSLIRLSCGDTTFNEIQLAVSSVILVVVPLSLILVSYGAIARAVMRINSTEAWKKALRTCSSHLIVVTLFYSSVIAVYLQPKNPYAQERGKFFGLFYAVGTPTLNPLIYTLRNKEVKRAFWRLLGKDGDSKNT

SEQ ID NO: 891 - protein, 310 aa, Artificial Sequence
  Synthetic
NQSTPVGFLLLGFSEHPQLEKVLFVVVLCSYLLTLLGNTLILLLSTLDPRLHSPMYFFLSNLSFLDLCFTTTCVPQMLFNLWGPTKTISFLGCSVQLFIFMLLGTTECILLTVMAFDRYVAVCQPLHYATIIHPRLCRQLAGVAWAIGLVQSIVQIPPTLTLPFCSHRQIDDFLCEVPSLIRLSCGDTTFNEIQLSVAGVIFLLVPLSLIIVSYGVIARAVLKTNSSKGRRKAFGTCSSHLIVVTLFYSSVIAVYLQPKNPYAQERSKFFGLFYAVGTPTLNPLVYTLRNKEVKRAFWRLLGKDAASGRN

SEQ ID NO: 892 - protein, 312 aa, Artificial Sequence
  Synthetic
MDGVNDSSLQGFVLMGISDHPQLEMIFFIAILFSYLLTLLGNSTIILLSRLEARLHTPMYFFLSNLSSLDLAFATSSVPQMLINLWGPGKTISYGGCITQLYVFLWLGATECILLVVMAFDRYVAVCRPLRYTAIMNPQLCWLLAVIAWLGGLGNSVIQSTFTLQLPLCGHRRVEGFLCEVPAMIKLACGDTSLNQAVLNGVCTFFTAVPLSIIVISYCLIAQAVLKIRSAEGRRKAFNTCLSHLLVVFLFYGSASYGYLLPAKNSKQDQGKFISLFYSLVTPMVNPLIYTLRNMEVKGALRRLLGKGREVG

SEQ ID NO: 893 - protein, 312 aa, Artificial Sequence
  Synthetic
MDGVNDSSLQGFVLMGISDHPQLEMIFFIAILFSYLLTLLGNSTIILLSRLEARLHTPMYFFLSNLSSLDLAFATSSVPQMLINLWGPGKTISYGGCITQLYVFLWLGATECILLVVMAFDRYVAVCRPLRYTAIMNPQLCWLLAVIACLGGLGNSVIQSTFTLQLPLCGHRRVEGFLCEVPAMIKLACGDTSLNQAVLNGVCTFFTAVPLSIIVISYCLIAQAVLKIRSAEGRRKAFNTCLSHLLVVFLFYGSASYGYLLPAKNSKQDQGKFISLFYSLVTPMVNPLIYTLRNMEVKGALRRLLGKGREVG

SEQ ID NO: 894 - protein, 312 aa, Artificial Sequence
  Synthetic
MEVDSNSSSGSFILMGVSDHPHLEIIFFAVILASYLLTLVGNLTIILLSRLDARLHTPMYFFLSNLSSLDLAFTTSSVPQMLKNLWGPDKTISYGGCVTQLYVFLWLGATECILLVVMAFDRYVAVCRPLHYMTVMNPRLCWGLAAISWLGGLGNSVIQSTFTLQLPFCGHRKVDNFLCEVPAMIKLACGDTSLNEAVLNGVCTFFTVVPVSVILVSYCFIAQAVMKIRSVEGRRKAFNTCVSHLVVVFLFYGSAIYGYLLPAKSSNQSQGKFISLFYSVVTPMVNPLIYTLRNKEVKGALGRLLGKGRGAS

SEQ ID NO: 895 - protein, 312 aa, Artificial Sequence; identical to SEQ ID NO: 894
  Synthetic

SEQ ID NO: 896 - protein, 313 aa, Artificial Sequence
  Synthetic
MGTVCNDTHGDFILRGFSDKPYLEKVLFGVILVFYCLTLAGNTIIIFVSLKDPKLQIPMYFFLSNLSLLDICFTSSCVPQMLVNLRSPKKTITYSGCATQLYIFLWLGATECVLLVVMAVDRYVAVCHPLRYVTVMHPKVCLQLAVLAWGSGLIQSLIQSTATLRLPFCSQRVVDNIVCEVPALIQLSSADTTYNEVQMSIASVILLVLPLAIILSSYGAIVKSVLKIKSPAGQKKAFGTCTSHLLVVSLFYGTVTGVYLQPKTHYAHEWGKFLTLFYTVITPTLNPLIYTLKNKEVKEAVIRLWWKTWISQR

SEQ ID NO: 897 - protein, 312 aa, Artificial Sequence
  Synthetic
MILVNKSHPEEFILLGFADRPWLELPLFIILLVTYPTAMIGNIAIILMSILDPCLHSPMYFFLTNLSFLDMCYTTSIVPQMLINLWGSTKTISYLRCVVQLYFFHTMGGTECVLLALMSFDRYVAICKPLHYTLIMNRRNCLLLVSTVWLTGISYAVSEATVTLQLPLCGHNKMDHLVCEIPILIKTACGEKETNELALSVICIFLLAVPLCLILASYASIGHAVFKIKSIEGRKKAFGTCSSHLIVVLLFYGPGISMYLQPPSSITKDQPKFMALFYGVVTPTLNPFIYTLRNKDVKGALGNLFRNIFIPK

SEQ ID NO: 898 - protein, 312 aa, Artificial Sequence
  Synthetic
MALINKSHPEEFILLGFADRPWLELPLFIILLVTYPTAMIGNIAIILVSILDPCLHSPMYFFLTNLSFLDMCYTTSIVPQMLTNLGSSTKTISYMRCVVQLYFFHIMGGTECVLLALMSFDRYVAICKPLHYTLIMNQRNCILLVSTVWLTGISYAVSEATVTLQLPLCGHNKLDHLVCEIPILIKTACGEKETNELALSVVCIFLLAVPLCLILASYASIGHAVFKIKSSEGRKKAFGTCSSHLIVVLLFYGPAISMYLQPPSSITKDQPKFMALFYGVVTPTLNPFIYTLRNKDVKGALGNLFKNIFMSK

SEQ ID NO: 899 - protein, 312 aa, Artificial Sequence
  Synthetic
MAVTNESHPKEFILLGFANHPWLELPLFVTLLITYPMALMGNIAIILVSTLDPRLHSPMYFFLTNLSFLDMCYTTSIVPQMLFNLGSSRKTITYIGCVVQLYVFHIMGGTECLLLAIMSFDRYVAICKPLHYTLIMNQRVCILLVSIMWLTGVIFAFSEATLTLQLPLCGIHKLDHLLCEIPVLIKTACGEKESNELALSVVCIFILAVPLCLILASYVNIGCAVLRIKSSEGRKKAFGTCSSHLVVVSLFYGPAISMYLQPSSSITRDQPKFMALFYAVITPTLNPFIYTLRNKDVKGALKKLLRSIFSSK

SEQ ID NO: 900 - protein, 312 aa, Artificial Sequence
  Synthetic
MAVTNESHPKEFILLGFANHPWLELPLFVTLLITYPMALMGNIAIILVSTLDPRLYSPMYFFLKNLSFLDMCYTTSIVPQMLFNLGSSRKTITYIGCVVQLYVFHIMGGTECLLLAIMSFDRYVAICKPLHYTLIMNQRVCILSVSIMWLTGVIFGFSEATLTLQLPLCGTNKLDHLLCEIPVLIKTACGEKEFNELALSVVCIFILIVPLCLILASYVNIGCAVLRIKSSEGRRKAFGTCSSHLIVVSLFYGPGISMYLQPSSSITRDQPKFMALFYAVITPTLNPFIYTLRNKDVKGAFKKLLRSIFSSK

SEQ ID NO: 901 - protein, 316 aa, Artificial Sequence
  Synthetic
MNLGNESAPKIFILLGFSSHPWLEMPLFIMVLVAYVCTVLGNISIIVVSRRDPQLDSPMYFFLSNLSFLDLCFTTTTIPQLLRNLWGPDKSISYGGCVTQFYIFHFLGATECILLAVMSLDRYIAICKPLRYPAIMHQQLCILLVSMAWLSGLANSLLQSTLTVKLPFCGNNKVDNFLCEVPVMIKMSCANTAFNIAMLSIVGTFYSLVPLSLILISYGFIVATVLRIRSSEGKKKAFNTCGSHVVVVTLFYGPVISMYVQPSSSNSQDKNKLLSLFYSLVTPMLNPFIYTLRNKDMKGAMKRLLVSLYHKGAEQT

SEQ ID NO: 902 - protein, 315 aa, Artificial Sequence
  Synthetic
MKSDNHSGDSPKAFILLGVSDRPWLELPLFVVLLLSYVLAMLGNVAIILASRVDPQLHSPMYIFLSHLSFLDLCYTTTTVPQMLVNMGSSQKTISYGGCTVQYAVFHWLGCTECIVLAAMALDRYVAICKPLHYAVLMHRALCQQLVALAWLSGFGNSFVQVVLTVQLPFCGRQVLNNFFCEVPAVIKLSCADTAVNDTILAVLVAFFVLVPLALILLSYGFIARAVLRIQSSKGRHKAFGTCSSHLMIVSLFYLPAIYMYLQPPSSYSQEQGKFISLFYSIITPTLNPFTYTLRNKDMKGALRRLLARIWRLCG

SEQ ID NO: 903 - protein, 314 aa, Artificial Sequence
  Synthetic
MRGDNHSWDTPKDFILLGISDRPWLELPVFAVLLVFYILAMLGNISIILVSQLDPQLHSPMYIFLSHLSFLDLCYTTTTVPQMLFNMGSSQKTISYGGCTVQYAIFHWLGCTECVVLAAMALDRYVAICEPLRYAIIMHRPLCQQLVAMAWLSGFGNSLVQVILTVQLPFCGRQVLNNFFCEVPAMIKLSCADTTANDATLAVLVAFFVLVPLALILLSYGFIARAVMRIQSSRGRHKAFGTCSSHLLVVSLFYLPAIYMYLQPPSSYSQEQGKFISLFYSIITPTLNPFIYTLRNKDVKGALRRLLARRLCGR

SEQ ID NO: 904 - protein, 316 aa, Artificial Sequence
  Synthetic
MSVNRISADFPEDFILMGFTKYPWLDLPLFFVLLTSYMFTLLGNIAIILVSQLDSQLQSPMYFFLTSLSFLDLCFTTTTVPQMLFNLQGPNKNITYIGCMAQAYVFHWLGCTECVLLGIMALDRYVAVCKPLRYSVIMDHRLCLQLSGAAWLTGLANSLLQSTLTIQLPLCGNRMLDHFFCELPGLIKMSCGDTTVNEVTLAVVATFFIMGPLSMILVSYSYIAQTVFRMPSAAGRLKAFNTCSSHLLVVSLFYGPGIYIYMQPSEDGSQDLIKVLTLFYCVITPMANPFIYTLRNKDVIGALKRLLRKAISTKGI

SEQ ID NO: 905 - protein, 317 aa, Artificial Sequence
  Synthetic
MQVTTERQNVSFPDTFVLVGFSDHPWLEMPLFGVLLISYIFTMIGNSSIIVLSLVEPRLQTPMYFFLDNLSLLDLCVTCTIVPQLLVNLWGPEKTIASWSCIAQAYLFHWTSCTESALLAVMAFDRYVAICCPLRYVLIMHLWACVWLAAVCWASGLANSLVQATLTLYLTLCAKNTLDHFFCEVPALIKLACSDTTTNDLSLALGAIPFGIVSPLTVLISYIFIARAVLKLPSAEGRRKALSTCTSHLLVVTMYFGPGMYTYLQPPGNNTQSEFLSLFYCVFTPLLNPLIYTLRNKDVKEAWKKVLTSKGISLKGQ

SEQ ID NO: 906 - protein, 320 aa, Artificial Sequence
  Synthetic
FVVSMTWENHSVLMEFVFLAYPNRLELRMFCFLGISLAYALIISGNILIMVSIQTETRLHSPMYYFLGSLSGIELCYTAVVVPHILANTLKSEKNITLLSCATQMVFFIGLGSADCFLLASMAYDRYVAICHPLQYPLIMTVTLCVRLVLASVVIGLVLSLQLVVFIFCLPFCQDRGIEHFFCDVPPVMRLVCATSHIHELSVLVAAALAIAVPFFFIATTYALIVAAVLKLHSAAGRHRAFNTCSSHLTVVLLQYGCCAFMYLRPNSSYHPKKDQFISLVYTLGTPFLNPLIYTLRNNEMKGAIEKVLTRNYFSQKNIQ

SEQ ID NO: 907 - protein, 320 aa, Artificial Sequence
  Synthetic
AVDSMTWKNHSLFMEFVFLAYPKRPELRMLCFFGVSLAYGLIISGNILIVVSIQTETRLHTPMYYFLGSLSGIELCYTAVVVPHILANNFQSEKTISLLSCATQMVFLIGLGSADCFLLAIMAYDRYVAICHPLQYPLIMTITLCVRLVVASVVIGLFLSLQLVVFIFCLPFCQDRGIEHFFCDAPPLMRLVCATSHIHELSVLMAATLAIAVPFFFIATTYALIVAAVLKLHSAAGRHRAFNTCSSHLTVVLLQYGCCAFMYLRPVSSYHPKQDQFVSLVYTLGTPFLNPLIYTLRNSEMKGAIGKVLTRKYLSWKMIG

SEQ ID NO: 908 - protein, 305 aa, Artificial Sequence
  Synthetic
MEFVFLAYPSCPELHILSFLGVSLVYGLIITGNILIVVSIHTETCLCTSMYYFLGSLSGIEICYTAVVVPHILANTLQSEKTITLLGCATQMAFFIALGSADCFLLAAMAYDRYVAICHPLQYPLLMTLTLCVHLVVASVISGLFLSLQLVAFIFSLPFCQAQGIEHFFCDVPPVMHVVCAQSHIHEQSVLVAAILAIAVPFFLITTSYTFIVAALLKIHSAAGRHRAFSTCSSHLTVVLLQYGCCAFMYLCPSSSYNPKQDQFISLVYTLGTPLLNPLIYALRNSEMKGAVGRVLTRNCLSQNS

SEQ ID NO: 909 - protein, 305 aa, Artificial Sequence
  Synthetic
MEFVFLAYPSCPELHILSFLGVSLVYGLIITGNILIVVSIHTETCLCTSMYYFLGSLSGIEICYTAVVVPHILANTLQSEKTITLLGCATQMAFFIALGSADCFLLAAMAYDRYVAICHPLQYPLLMTLTLCVHLVVASVISGLFLSLQLVAFIFSLPFCQAQGIEHFFCDVPPVMHVVCAQSHIHEQSVLVAAILAIAVPFFLITTSYTFIVAALLKIHSAAGRHRAFSTCSSHLTVVLLQYGCCAFMYLCPSSSYNPKQDRFISLVYTLGTPLLNPLIYALRNSEMKGAVGRVLTRNCLSQNS

SEQ ID NO: 910 - protein, 308 aa, Artificial Sequence
  Synthetic
MEGINKTAKMQFFFRPFSPDPEVQMLIFVVFLMMYLTSLGGNATIAVIVQINHSLHTPMYFFLANLAVLEIFYTSSITPLALANLLSGKTPVSITGCGTQMFFFVFLGGADCVLLVVMAYDQFIAICHPLRYRLIMSWSLCVELLVGSLVLGFLLSLPLTILIFHLPFCHNDEIYHFYCDMPAVMRLACADTRVHKTALYIISFIVLSIPLSLISISYVFIVVAILRIRSAEGRQQAYSTCSSHILVVLLQYGCTSFIYLSPSSSYSPEMGRVVSVAYTFITPILNPLIYSLRNKELKDALRKALRKF

SEQ ID NO: 911 - protein, 308 aa, Artificial Sequence
  Synthetic
MEIINKTAKVQFFFRPFSPDPGVQMVIFVTFLVMYLTSLSGNATIAVIVHINHSLHTPMYFFLANLAVLEIFYTSSIAPLALANLLSGKTPVSITGCGTQMFFFVFLGGADCVLLAVMAYDRFVAICYPLRYTLIMSWSLCVEMMVGSLVLGFLLSLPLTILIFHLPFCHNNEIYHFYCDMPAVIRLACGDTHVHRTALYIISFIVLSIPLTLISISYVFIITAILRIRSAEGRHRAFSTCSSHIVVVLLQYGCTSFIYLSPSSSYSPEMGRMVSVVYTFITPILNPLIYSMRNKELKDALRKALRKF

SEQ ID NO: 912 - protein, 317 aa, Artificial Sequence
  Synthetic
MEEGNQTGMVLFHFRPFSKLPEVQMLIFVLFLMMYLVSIGGNMSIVLTIWTNRCLHTPMYFFLANLASLEIFYSSTIAPLTLASILSTERVVSLAGCGAQMFFFIFLGSADCILLAVMAYDRFVAICHPLRYTLIMSWHLCVQLALGSLLLGFILAMQLTVLIFQLPFCSSKEISLFYCDVLPVMRLACADTHVHEATLFVVSVIVLTIPFLLITLSYVFIVDAILKIRSAEGRHKAFSTCSSHLTVVLLQYGCTSLIYLCPSSSYSPERGQVVSVVYTFITPVLNPLIYSMRNRELKDALRRVIMKLVLIQTQEAL

SEQ ID NO: 913 - protein, 319 aa, Artificial Sequence
  Synthetic
MEEENQTGVVYFHFRPFSTNSTVASLVFVGFLLLYLGSLIGNLTIGLTVWQDHSLHTPMYFFLFVLATLELGYSTNIAPLTLASILSMGKLISLPSCGAQMFFFILLGGSDCVLLAIMAYDRYVAICHPLHYSLIMSWQLCGQMALGSLGLGFLLSLPLTILICHLPFCGHNEIYHFFCDMPAVMRLACTDTHIHQAALFAISVAAVAIPFLLICLSYGCIVATILRMTSAEGKRRAFSTCSSHLLVVVLQYGCCTLIYLRPSSSYSPEEGRAVSVVYTFFSPLLNPLIYSLRNQEVTDAVKRLLTRMFWFRKPERFLP

SEQ ID NO: 914 - protein, 314 aa, Artificial Sequence
  Synthetic
MLTGKSVLNQSGTTEFVFRVFTTVPEFQALLFLLFLLLYLMILCGNAAIIWVVCTHSALHTPMYFFLSSLSVLEIFYTTDVVPLMLSNIFGAQKPISLAGCGTQMFFFVTLGSTDCFLLAVMAYDRYVAICHPLHYSLIMTKKLCVQMVMGSWSLALFLSLQLTALIFTLPFCGHQEINHFLCDVPPVLRLACADIHVHQAVLYVVGILVLTVPFLLICISYVFIASTILRMRSAEGRQRAFSTCSSHLTVVLLQYGCCSLVYLRPRSSTSEDEDRQIALVYTFVTPLLNPLIYTLRNKDVKGALKNSIFHKAV

SEQ ID NO: 915 - protein, 314 aa, Artificial Sequence; identical to SEQ ID NO: 914
  Synthetic

SEQ ID NO: 916 - protein, 318 aa, Artificial Sequence
  Synthetic
MLTGKLVLNQSGTPEFVFRVFTNAPEFQALLFTLFLLLYLMIFCGNTAIIWVVCTHTSLHTPMYFFLSSLSFLEICYTTDVVPLMLSNIFGTQKPISLAGCGTQMFFFLTLGGTDCFLLAIMAYDRYVAICHPLHYNLIMTKKLCVQMVMGSLSLALFLSLQLTALIFTLPFCGHLEINHFLCDVPPVLRLACADIHVHQAVLYVVGILVLTVPFLLIFISYVFIVSTILRMRSAEGRQRAFSTCSSHLTVVLLQYGGCSLVYLRPRSSSSDDEDRQIALVYTFVTPLLNPLIYTLRNKDVKGALRNSIFCKSASHCS

SEQ ID NO: 917 - protein, 318 aa, Artificial Sequence
  Synthetic
MVDRNPFFNKSGPPEFVFRVLTNVPEFQAILFTLFFLLYLMILCGNTTIIWVVCNHSSLHTPMYFFLGSLSFVEICYITDVVPLILSNIFGDQKPISLAGCGTQMFFFSVFGCTDCFLLTVMAYDRYVAICHPLHYNLIMTQKLCVQMVIGSLSLALLLSLELTAFTFTLPFCRHLEINHFLCDVAPIMRLACADIHVNQAVLYVVSILVLTVPFLLIFISYVFIASTILRMHSAEGRQRAFSTCSSHLTVVLLQYGCCSLVYLRPRSSTSEDEDRQIALVYIFGTPLLNPLIYTLRNKDIKDALRNSFFHVPASDTS

SEQ ID NO: 918 - protein, 318 aa, Artificial Sequence
  Synthetic
MPVGKLVFNQSEPTEFVFRAFTTATEFQVLLFLLFLLLYLMILCGNTAIIWVVCTHSTLRTPMYFFLSNLSFLELCYTTVVVPLMLSNILGAQKPISLAGCGAQMFFFVTLGSTDCFLLAIMAYDRYVAICHPLHYTLIMTRELCTQMLGGALGLALFPSLQLTALIFTLPFCGHQEINHFLCDVPPVLRLACADIRVHQAVLYVVSILVLTIPFLLICVSYVFITCAILSIRSAEGRRRAFSTCSFHLTVVLLQYGCCSLVYLRPRSSTSEDEDSQIALVYTFVTPLLNPLLYSLRNKDVKGALRSAIIRKAASDAN

SEQ ID NO: 919 - protein, 318 aa, Artificial Sequence
  Synthetic
MPVGKLVFNQSDPTEFVFRAFTTATEFQVLLFLLFLLLYLMILCGNTAIIWVVCTHSTLRTPMYFFLSNLSFLELCHTTVVVPLMLSNILGAQKPISLAGCGAQMFFFVTLGSTDCFLLAIMAYDRYVAICHPLHYTLIMTRELCTQMLGGALGLALFPSLQLTALIFTLPFCGHQEINHFLCDVPPVLCLACADIRVHQAVLYVVSILVLTIPFLLICVSYVFITCAILSIRSAEGRRRAFSTCSFHLTVVLLQYGCCSLVYLRPRSSTSEDEDSQIALVYTFVTPLLNPLLYSLRNKDVKGALRSAIIRKAASDAN

SEQ ID NO: 920 - protein, 311 aa, Artificial Sequence
  Synthetic
MTPLKKNHTLSSEFIILGFGDLAELQFLFFGLFLIMHLITLAGHTTIVLITLIDTCLQTPMYFFLRNLSAIEICYILVIVPNMLANFLSRNQRMPFLGCALQMHLFIALGGAECFLLAAMAYDRFVAICNPLRYTLIITRALCLQMLALACISGFTLSLTLTTLIFLLPFCQSHVINHFFCDIPAVLFLACSDTQANEIAVFLVCMLILLIPFLLILFSYGFIIAAILRIHSAEGRSKAFSTCAGHLLVSVMHYGCAIFIYIRPKSCYTPEQDKIVSLIYTNVTPMLYPMIYSLRNKEVKGALRRLLVNHN

SEQ ID NO: 921 - protein, 309 aa, Artificial Sequence
  Synthetic
NTSMVTEFLLLGFSHLADLQGLLFSVFLTIYLLTVAGNFLIVVLVSTDAALQSPMYFFLRTLSALEIGYTSVTVPLLLHHLLTGRRHISRSGCALQMFFFLFFGATECCLLAAMAYDRYAAICEPLRYPLLLSHRVCLQLAGSAWACGVLVGLGHTPFIFSLPFCGPNTIPQFFCEIQPVLQLVCGDTSLNELQIILATALLILCPFGLILGSYGRILVTIFRIPSVAGRRKAFSTCSSHLIVVSLFYGTALFIYIRPKASYDPATDPLVSLFYAVVTPILNPIIYSLRNTEVKAALKRTIQKTVPMEI

SEQ ID NO: 922 - protein, 312 aa, Artificial Sequence
  Synthetic
MSANTSMVTEFLLLGFSHLADLQGLLFSVFLTIYLLTVAGNFLIVVLVSTDAALQSPMYFFLRTLSALEIGYTSVTVPLLLHHLLTGRRHISRSGCALQMFFFLFFGATECCLLAAMAYDRYAAICEPLRYPLLLSHRVCLQLAGSAWACGVLVGLGHTPFIFSLPFCGPNTIPQFFCEIQPVLQLVCGDTSLNELQIILATALLILCPFGLILGSYGRILVTIFRIPSVAGRRKAFSTCSSHLIMVSLFYGTALFIYIRPKASYDPATDPLVSLFYAVVTPILNPIIYSLRNTEVKAALKRTIQKTVPMEI

SEQ ID NO: 923 - protein, 306 aa, Artificial Sequence
  Synthetic
MVTEFLLLGFSHLADLQGLLFSVFLTIYLLTVAGNFLIVVLVSTDAALQSPMYLFLRTLSALEIGYTSVTVPLLLHHLLTGRRHISRSGCALQMFFFLFFGATECCLLAAMAYDRYAAICEPLRYPLLLSHRVCLQLAGSAWACGVLVGLGHTPFIFSLPFCGPNTIQQFFCEIQPVLQLVCGDTSLNELQIILATALLILCPFGLILGSYGRILVTIFRIPSVAGRRKAFSTCSSHLIVVSLFYGTALFIYIRPKASYDPATDPLVSLFYAVVTPILNPIIYSLRNTEVKAALKRTIQKTVPMEI

SEQ ID NO: 924 - protein, 316 aa, Artificial Sequence
  Synthetic
MAIGNWTEISEFILMSFSSLPEIQSLLFLTFLTIYLVTLKGNSLIILVTLADPMLHSPMYFFLRNLSFLEIGFNLVIVPKMLGTLLAQDTTISFLGCATQMYFFFFFGVAECFLLATMAYDRYVAICSPLHYPVIMNQRTRAKLAAASWFPGFPVATVQTTWLFSFPFCGTNKVNHFFCDSPPVLKLVCADTALFEIYAIVGTILVVMIPCLLILCSYTRIAAAILKIPSAKGKHKAFSTCSSHLLVVSLFYISSSLTYFWPKSNNSPESKKLLSLSYTVVTPMLNPIIYSLRNSEVKNALSRTFHKVLALRNCIP

SEQ ID NO: 925 - protein, 302 aa, Artificial Sequence
  Synthetic
MSFSSLPEIQSLLFLTFLTIYLVTLMGNCLIILVTLADPMLHSPMYFFLRNLSFLEIGFNLVIVPKMLGTLLAQDTTISFLGCATQMYFFFFFGVAECFLLATMAYDRYVAICSPLHYPVIMNQRTRAKLAAASWFPGFPVATVQTTWLFSFPFCGTNKVNHFFCDSPPVLRLVCADTALFEIYAIVGTILVVMIPCLLILCSYTHIAAAILKIPSAKGKNKAFSTCSSHLLVVSLFYISLSLTYFRPKSNNSPEGKKLLSLSYTVMTPMLNPIIYSLRNNEVKNALSRTVSKALALRNCIP

SEQ ID NO: 926 - protein, 320 aa, Artificial Sequence
  Synthetic
MLIPMATGNQTRITEFILMSFSSLPEIQTLLFLAFLTIYLVTLLGNSLIILVTLADPMLQSPMYFFLRNLSFLEIGFNLVIVPKMLGTLIAQDTSISFLGCATQMYFFFFFGVAECFLLATMAYDRYVAICSPLHYPVIMNQETRVKLAAASWFPGFPVATVQTTWLFSFPFCATNKVNHFFCDSPPVLRLVCADTAQFEVYAIVGTILVVMIPCLLILCSYTLIAASILKIPSAKGKHKAFSTCSSHLLVVSLFYVSSSLTYFRPKSNNSPESKKLLSLSYTVVTPMLNPIIYSLRNNEVKSALSRTFHKALALRNHIT

SEQ ID NO: 927 - protein, 316 aa, Artificial Sequence
  Synthetic
MPSENWTIVSEFVLVSFSALSELQALLFLLFLTIYLVTLMGNVLIILVTIADSALQSPMYFFLRNLSFLEIGFNLVIVPKMLGTLIIQDTTISFLGCATQMYFFFFFGAAECCLLATMAYDRYVAICDPLHYPVIMGHISCAQLAAASWFSGFSVATVQTTWIFSFPFCGPNRVNHFFCDSPPVIALVCADTSVFELEALTATVLFILFPFLLILGSYVRILSTIFRMPSAEGKHQAFSTCSAHLLVVSLFYSTAILTYFRPQSSASSESKKLLSLSSTVVTPMLNPIIYSSRNKEVKAALKRLIHRTLGSQKLRL

SEQ ID NO: 928 - protein, 314 aa, Artificial Sequence
  Synthetic
MMWENWTIVSEFVLVSFSALSELQALLFLLFLTIYLVTLMGNVLIILVTIADSALQSPMYFFLRNLSFLEIGFNLVIVPKMLGTLIIQDTTISFLGCATQMYFFFFFGAAECCLLATMAYDRYVAICDPLHYPVIMGHISCAQLAAASWFSGFSVATVQTTWIFSFPFCGPNRVNHFFCDSPPVIALVCADTSVFELEALTATVLFILFPFLLILGSYVRILSTIFRMPSAEGKHQAFSTCSAHLLVVSLFYSTAILTYFRPQSSASSESKKLLSLSSTVVTPMLNPIIYSSRNKEVKAALKRLIHRTLGSQKL

SEQ ID NO: 929 - protein, 318 aa, Artificial Sequence
  Synthetic
SCKRMTWGNWTTVREFILMSFSSLSEVQALLFLLFLIIYLVTLMGNVLIILVTTADSALQSPMYFFLRNLSFLEIGFNLVIVPKMLSTLILQDKTISFLGCATQMYFFFFFGAAECCLLATMAYDRYMAICDPLHYPIIMSRRSCAQLAAASWFSGFPVATVQTTWIFSFPFCGPNMVNHFFCDSPPVIALVCADTSLFELEALTATVLFILFPFLLILGSYVRILSTIFRMPSAEGKRKAFSTCSSHLLVVSLFYSTAILTYFRPRSNTSPENKKMLSLSYTVVTPMLNPIIYSLRNNEVKAALRRIIHRTLGPQKL

SEQ ID NO: 930 - protein, 316 aa, Artificial Sequence
  Synthetic
MICENHTRVTEFILLGFTNNPEMQVSLFIFFLAIYTVTLLGNFLIVTVTSVDLALQTPMYFFLQNLSLLEVCFTLVMVPKMLVDLVSPRKIISFVGCGTQMYFFFFFGSSECFLLSMMAYDRFVAICNPLHYSVIMNRSLCLWMAIGSWMSGVPVSMLQTAWMMALPFCGPNAVDHFFCDGPPVLKLVTVDTTMYEMQALASTLLFIMFPFCLILVSYTRIIITILRMSSATGRQKAFSTCSSHLIVVSLFYGTASLTYLRPKSNQSPESKKLVSLSYTVITPMLNPIIYGLRNNEVKGAVKRTITQKVLQKLDVF

SEQ ID NO: 931 - protein, 316 aa, Artificial Sequence; identical to SEQ ID NO: 930
  Synthetic

SEQ ID NO: 932 - protein, 316 aa, Artificial Sequence
  Synthetic
MSNSELMKNGSLSLCTEFTLVAFSSLAELQLVLFVVFLVLYLFTVGGNLTIICVIWTTPSLHTPMYFFLANLSFLEMCYISSVVPQMLVHLLVQLKTISVAGCAAQMYVFTILGLTECCLLATMAYDRFVAICYPLHYTLWMDPSVCLKLAGASWMTGILVESAQTTWIFTLPFCGAGTIQHFFCDIMPVVKLACVDTSQNEMVIFIISLIFIMSPCLFILCSYVRIILTILKMPSAAGRHKAFSTCSSHILVVSLFYGTALFTYLQPKSSHTPDTDKVTALMYTVVTPALNPVIYTLRNKEVKEAFQKVTQKETS

SEQ ID NO: 933 - protein, 312 aa, Artificial Sequence
  Synthetic
MEACPSALNSTLVAFSSLAELQLVLFVVFLVLYLFTVGGNLTIICVIWTTPSLHTPMYFFLANLSFLEMCYISSVVPQMLVHLLVQLKTISVAGCAAQMYVFTILGLTECCLLATMAYDRFVAICYPLHYTLWMDPSVCLKLAGASWMTGILVESAQTTWIFTLPFCGAGTIQHFFCDIMPVVKLACVDTSQNEMVIFIISLIFIMSPCLFILCSYVRIILTILKMPSAAGRHKAFSTCSSHILVVSLFYGTALFTYLQPKSSHTPDTDKVTALMYTVVTPALNPVIYTLRNKEVKEAFQKVTQRKLHRQID

SEQ ID NO: 934 - protein, 317 aa, Artificial Sequence
  Synthetic
VNCSLWQENSLSVKRFAFAKFSEVPGECFLLFTLILLMFLVSLTGNALITLAICTSPALHTPMYFFLANLSLLEIGYTCTVIPKMLQSLVSEARGISREGCATQMFFFTLFGITECCLLAAMAFDRCMAICSPLHYTTRMNRGVCAHLAIVSWGTGCIVGLGQTNFIFSLNFCGPCEIDHFFCDLPPVLALACGDTSQNEAAIFVVAILCISSPFLLIIYSYVRILVAVLVMPSPEGRHKAFSTCSSHLLVVTLFFGSGSINYLRPKSSHSPGMDKLLALFYTAVTSMLNPIIYSLRNKEVKAALRRTLGLVLTMNR

SEQ ID NO: 935 - protein, 317 aa, Artificial Sequence
  Synthetic
CCPFFQEMNSLSVKRFAFAKFSEVPGECFLLFTLILLMFLVSLTGNSLIALAICTSAALHTPMYFFLANLSLLEIGYTCSVIPKMLQSLVSEARGISREGCATQMFFFIFFGITECCLLAAMAFDRYMAICSPLHYATRMSRGVCAHLAIVSWGMGCIVGLGQTNFIFSLNFCGPCEIDHFFCDLPPVLALACGDTSQNEAAIFVAAVLCIFSPFLLIISSYVRILIAVLVMPSREGRHKALSICSSHLLVVTLFYGSTSATYLRPKSDHSPEVDKLLALFYTAVTSMLNPIIYSLRNKEVKAALRKTLSLVLIMNR

SEQ ID NO: 936 - protein, 312 aa, Artificial Sequence
  Synthetic
FTEIRAEDNASTVTEFLLLGFSDLPNLQGILFGMFSIIYLIILVGNSFIIVITRIDPALQKPMYFFLANFSSLEICYVSVTLPRILFSIATQERKISVLSCATQLCFFLMLAATECFLLAVMSYDRYVAICNPLHYPLVMNPTKCTQLAAASWLGGIPVQIGQTCQIFSLHFCNSNQINHFLCDIPPILKLACGDTSINELSVYLVAILFAAVPFMLILASYGKIIATILKLPTATGRAKAFSTCSSHLLVVFLFFGSATITYLRPKSTHSPGTDKLFSLFYSIVTPMLNPLIYSLRNKEVIAALRKLLRIK

SEQ ID NO: 937 - protein, 312 aa, Artificial Sequence
  Synthetic
FTEIRAEDNASTVTEFLLLGFSDLPNLQGILFGMFSIIYLIILVGNSFIIVITRIDPALQKPMYFFLANFSSLEICYVSVTLPRILFSIAAQERKISVLSCATQLCFFLMLGATECFLLAVMSYDRYVAICNPLHYPLVMNPTKCTQLAAASWLGGIPVQIGQTCQIFSLHFCNSNQINHFFCDIPPFLKLACGDTSINELSVYLVAILFAAVPFMLILASYSKIIATILKLPTATGRAKAFSTCSSHLLVVFLFFGSATITYLRPKSTHSPGTDKLFSLFYTIVTPMLNPLIYSLRNKEVIAALRKLLRIK

SEQ ID NO: 938 - protein, 312 aa, Artificial Sequence
  Synthetic
FTEIRAEDNASTVTEFLLLGFSDLPNLQGILFGLFSIIYLIILIGNSFIIVITRIDPALQKPMYFFLANFSSLEICYVSVTLPRILFNIATQDRSISVVSCATQMCFFLMLGATECFLLAVMSYDRYVAICNPLHYPLVMNPTKCTQLAAASWLGGIPVQIGQTCQIFSLHFCNSNQIDHFFCDLPPILKLACGDTSIHELSVYLVAMLFVAFPFLLILASYTKIIATILKLPTATGRAKAFSTCSSHLLVVFLFFGSATITYLRPKSTHSPGTDKLLSLFYTIVTPMFNPLIYSLRNKEVIAALRKLLHIK

SEQ ID NO: 939 - protein, 311 aa, Artificial Sequence
  Synthetic
HSENSAMDNATSVTQFLLLGFSGVPNLQTFLFGMFSIMYVVILIGNTSILVIARIDPALQKPMYYFLANFSFLEICYVSVTLPRILYNLWTQDRGICLLACAIQMFFFLILAATECFLLAVMSYDRYVAICNPLHYPLVMNPTKCTQLAVGSWLGGIPVQIGQTCRIFSLHFCNSNIIEHFFCDVPPILKLACGDTSMHELSVYLVAMFFVASPFMLILASYSKIIATILKLPTATGRAKAFSTCSSHLVVVLLFFGSATINYLRPKSIHSVGTDELLSLFYTIVTPMFNPLIYSLRNKDVIAALRRLLLK

SEQ ID NO: 940 - protein, 311 aa, Artificial Sequence
  Synthetic
HEELESINNVSTVIQFVLIGFSDLPNLQGFLFAVFSVVYIIILIGNFLIIIIISTDQALQKPMYFFLANFSSLEICYVSVTVPRILFNIGTQNRSISLMSCATQLCFFLVFGTTECLLLAVMSYDRYVAICNPLHYPLVMNPTKCTQLAAVSWLGGIPVQIGQTCQIFSMNFCNSYKINHFFCDIPPILTLACGNTSVHELSVYVVVMVVAAFPFILVLTSYSKIIATILRLPTAKGRGKAFSTCSSHLLVVLLFYGSATVTYLRPKSMHSPGTDKLLSLFYTIVTPMFNPLIYSLRNKEVIAALRKLILK

SEQ ID NO: 941 - protein, 314 aa, Artificial Sequence
  Synthetic
HEELESIDNVSTVIQFVLIGFSDLPNLQGFLFAVFSVVYIIILIGNFLIIIIISMDQALQKPMYFFLANFSSLEICYVSVTVPRILFNIGTQNRSISLMSCATQMSFFLVFGTTESLLLAVMSYDRYVAICHPLLYPLIMNPTKCKQLAAVSWLGGMPVQIGQTCQIFSMNFCNSYKINHFFCDIPPILKLACGDTSVHELSVYVVVMVVAAFPFIPVLASYSKIIATILRLPTAKVRAKAFSTCSSHLMVVLLFYGSATVTYLRPKSMHSPGTDKLLSLFYTVVTPMFNPLIYSLRNKEVISALRKLLFKTYY

SEQ ID NO: 942 - protein, 311 aa, Artificial Sequence
  Synthetic
HDEIEAEVNISTVIQFVLLGFSALPNLQGILSALFSIIYRIILTGNCLIILITRLDHTLHKPMYFFLANFSSLEICYVSVTVPRILFNIWTQDRNISVLACAVQMCFFLMLGTDECFLLAVMSYDRYVAICNPLHYPLIMNSKKCTQLAAGSWLSGIPIQIGQTCWIFSMHFCDSNEIDHFFCDIPPILKLACGDTSVHELSVYVVVMVVAAFPFILVLTSYSKIIATILRLPTAKGRAKAFSTCSSHLLVVVLFYGSGTITYLRPKSTHSPGIDKLLSLFYTIVTPMFNPLIYSLRNKEVVVALRKLILQ

SEQ ID NO: 943 - protein, 311 aa, Artificial Sequence
  Synthetic
HTDIREEDNASAVTQFLLLGFSDLPNLQSFLFGVFSIMYLIMLIANSFIIVITKLDPTLQKPMYFFLVNFSFLEICYVSVILPRVLYSIWTQDRNISLLACATQMCFFLMLAATESIFLAVMSYDRYVAICSPLHYPLVMSPRKCRQLAAGSWLGGMPFQVGQTCQIFSLHFCNSNQIEHFFCDIPPVLKLACGDTSVIEMYVYVVAILLAAIPFILILTSYSKIIATILRLPTAEGRSKAFFTCSSHLVVVVLFFAPASITYLMPKSSHSAVSDKFLSLFYTIITPVFNPMIYSLRNKEVIAALRRLLLT

SEQ ID NO: 944 - protein, 315 aa, Artificial Sequence
  Synthetic
STLQSPQQNHSTFVAFILLGFSDVPNLQEFLFGLFLMVYLIILMGNSLIIIIIRADPSLQTPMYFFLGNFSFLEMCYVSVTLPRLLTDLYRQDRIISFMACATQMYFFLIFGATECFILTAMAYDRYVAICNPLLYPLIMNNSLCIQLAAGCWISGVPVHIGFTYWIFSLPFCGSNQLNHFFCDIPPVLTLACGDTFMIEMLIYVIALLVVTIPFMLILASYVKIISSILKLPSATGRAKAFSTCSSHLIVVALFFGSGIITYLRPKSSHSAGVDKFLSLFYTVVTPLFNPMIYCLRNKDVMIALKKIFLRCFML

SEQ ID NO: 945 - protein, 316 aa, Artificial Sequence
  Synthetic
HQQKPQEGNLTNLKEFVLLGFSDVPDLQWVLFGLLIAMYCFILLGNGTIVLITNVDSALQTPMYFFLGNFSFLEICYVSITLPRMVFNLGTQRRTISFIACATQMCCILILGATECFLLAVMAYDRYVAICNPLHYPLVMNQKVCSQLVIGSWISGIPIQIGQTSHIFSLSFCGSNQINHFFCDIPPILHLACGDIFINEMMVFLGAFLFVLFPFLLIVFSYSKIIFTVLKLSSTKSRAKAFSTCSSHLAVVILFFGSGMITYFRSNSSHSGETDKVLSLFYTVVTPMFNPMVYSLRNKDVTIALRKFLCKQFVKI

SEQ ID NO: 946 - protein, 315 aa, Artificial Sequence
  Synthetic
SKYVNLQRNLSVPIEFVLLGFSDIPQLHWFLFGIFFFIYMSILLGNGLIILITRVEPTLQTPMYFFISNLSFLEICYVSVTLPRMLMDLFTLKGNISFLACATQMCLFLILGGTECFLLAVMSYDRYVAICNPLHYPIVMSSKVCTQLVVGSWVIGVPIQVGQTYQILSLPFCESNQINHFFCDMPPLLRLACGNIFVNELVVFIFVVLIVTIPFMLILASYSRIISTILKLPSKTGRTKAFSTCSSHLIVVFLFYGSASITYLKPKSNKYEETDKLLSVFYTILTPMFNPLIYSLRNKDVTGALKKLFTRLLAL

SEQ ID NO: 947 - protein, 315 aa, Artificial Sequence
  Synthetic
SKYVNLQRNLTVPIEFVLLGFSDIPQLHWFLFGIFLFIYMIILLGNGIIILITKVEPTLQTPMYFFISNFSFLEICYVSVTLPRMLMDLFTLKGNISFLACATQMCLFLILGATECFLLAVMSYDRYVAICNPLLYPVVMSSKVCTQLVVGSWVIGVPIQVGQTYQILSLPFCESNQINHFFCDIPPLLKLACGNIFVNELVVFIFAVLIVTIPFMLILASYSRIISTILKLPSNTGRTKAFSTCSSHLIVVFLFYGSASITYLKPKSNKFEGTDKLLSLFYTILTPMFNPLIYSLRNKDVTGALKKLFTRLLAL

SEQ ID NO: 948 - protein, 319 aa, Artificial Sequence
  Synthetic
DKKEIKSKNLNISITEFVLLGFSDVPQLQWMLFGIFLFMYLSILISNSIIMLITRTDSALQTPMYFFLSNFSFVEICYVTVTIPRMLMDLCTQKGTISLLSCAVQLCFVIMLGGMEFLLLTVMAYDRYVAICNPLHYPLVMNNKVCVQLVAACWICIIPVVTGQTYQIFSLPYCGSNKIHHFFCDIPPLLKLACGDTFVNNLAIYIASVVFIMVPFLLILVSYGKIICNVLKLATSGGRSKAFSTCSSHLIVVVLFYGTATITYAQPKAYQSETLGKLLSLFYTILIPLLNPIIYTLRNKDIMVALRKLQTKLSTYGNT

SEQ ID NO: 949 - protein, 319 aa, Artificial Sequence; identical to SEQ ID NO: 948
  Synthetic

SEQ ID NO: 950 - protein, 314 aa, Artificial Sequence
  Synthetic
EKIKAEKSNASSLIEFILLGFSDVPNLQWILFGIFLIMYLTILMCNSTIVLITRTDPALQTPMYFFLSNFSFVEICYVTVTIPRMLVDLCTQKGNISILACATQMCFILMLGGTECLLLTAMAYDRYVAICNPLHYSLVMNHRICTQLVAACWISVIPVVIGQTYQIFSLPFCGSNRINHFICDIPPVLKLACGDTFVNEIAVYVVAMVFVMVPFMLIIFSYCKIICSILKLSSAKGRTKAFSTCSSHLIVVVLFYGTAGITYLQPKPNQSEITGKLLSLFYTILIPTLNPIIYTLRNKDIMAALRKLLSKILV

SEQ ID NO: 951 - protein, 307 aa, Artificial Sequence
  Synthetic
MEFILLGFSNVPHLQWVLFMVFLFMYMTILLCNSIIIVLAKTDPALQTPMYFFLSNFSFLEICYVTATIPRMLMDLYTLKGNISVFACATQMYFVLTLGGTECLLLAAMAYDRYVAICHPLQYSLLMKNKVCLQLVAASWISGIPVEIGQTYQIFSLHFCASNRIDHFFCDIPPLLKLACGDTFMNTVAVYVVAVLFVMVPFLLIIVSYIKIICNIMKLSSAKGMAKAFSTCSSHLIVVILFYGTASITYLQPKQSQSEGMGKMLSLFYTILIPALNPIIYSLRNKDIMMALRKLHSKLLIWWENLK

SEQ ID NO: 952 - protein, 307 aa, Artificial Sequence
  Synthetic
MEFILLGFSNVPHLQWVLFMVFLFMYMTILLCNSIIIVLAKTDPALHTPMYFFLSNFSFLEICYVTATIPRMLMDLYTLKGNISVFACATQMYFVLMLGATECLLLAAMAYDRYVAICHPLQYSLLMKNKVCLQLVAASWISGIPVQIGQTYQIFSLHFCASNKIDHFFCDIPPLLKLACGDIFMNTVAVYVVAVVFVMVPFLLIIVSYIKIICNIMKLSSAKGMAKAFSTCSSHLIVVVLFYGTASITYLQPKQSQSEGMGKLLSLFYTILIPALNPIIYTLRNKDIMMALRKLHSKLLIWWKNVK

SEQ ID NO: 953 - protein, 301 aa, Artificial Sequence
  Synthetic
MEFVLLGFSDIPNLHWMLFSIFLLMYLMILMCNGIIILLIKIHPALQTPMYFFLSNFSLLEICYVTIIIPRMLMDIWTQKGNISLFACATQMCFFLMLGGTECLLLTVMAYDRYVAICKPLQYPLVMNHKVCIQLIIASWTITIPVVIGETCQIFLLPFCGTNTINHFFCDIPPILKLACGNIFVNEITVHVVAVVFITVPFLLIVVSYGKIISNILKLSSARGKAKAFSTCSSHLIVVILFFGAGTITYLQPKPHQFQRMGKLISLFYTILIPTLNPIIYTLRNKDIMVALRKLLAKLLT

SEQ ID NO: 954 - protein, 301 aa, Artificial Sequence; identical to SEQ ID NO: 953
  Synthetic

SEQ ID NO: 955 - protein, 314 aa, Artificial Sequence
  Synthetic
MRRQNHNSTVEFILLGFSNYPELQGQMFGAFLVIYLVTVLGNAIIITIIFLDQSLHIPMYLFLQNLSLVDLCFSTVITPEILVVLTSEKATISFGGCFVQMYFILLFGGTECFLLGAMAYDRFAAICHPLSYPVIMNKSVFVKLVMFSWVSGTMMTTLQTTWVFSFPYCDHKEINHLFCETPPVLELACADTFLFEVYAFTGTILIVMVPFLLILLSYTRILFSILRMPSTTGRQKAFSTCASHLTSVTLFYGTASITYLQPKSRYSPDTKKLMSLAYTLLTPLLNPLIYSLRNKEMKRAVVKLWQRKVTLHTG

SEQ ID NO: 956 - protein, 317 aa, Artificial Sequence
  Synthetic
MSLRQTQNHSSTVEFILLRFSNYPELQDQMFGTFLVIYLVTVMGNAIIITIIFLDQSLHIPMYLFLQNLSLVDLCFSTVITPKMLVVLTSKKATISFGGCFAQMYFILFFGVTECFLLGAMAYDRFAAICHPLSYPMIMNKRVFMKLVMFSWVSGTMMSTLQTTWVFSFPYCDHKEINHLFCETPPVLELACADTFLFEVYAFTGTIFIVMVPFLLILLSYTRILFTILRMPSTTGRQKAFSTCASHLTSVTLFYGTASIIYLQPKSRYSPDTKKLMSLAYILLTPLLNPLIYSLRNKEMKRAVLKLWQRKVAFHTA

SEQ ID NO: 957 - protein, 314 aa, Artificial Sequence
  Synthetic
MRRQNHSSTVEFILLGFSNYPELQGQMFGAFLVIYLVTVLGNAIIITIIFLDQSLHIPMYLFLQNLSLVDFCFSTVITPEILVILTSEKATISFGGCFVQMYFILLFGATECFLLGAMAYDRFAAICHPLTYPVIMSKRTFVKLVMCPWVLSIMTAVLSVTWVASFPYCDHKEINHLFCEIPPVLELACADTFLFEVYAFTSTILIVMVPFLLILLSYTRILFSILKMPSTTGRQKAFSTCASHLTSVILFYGTASITYLQPKSGYSPDTKKLMSLAYTLLTPLLNPLIYSLRNKEMKRAVVKLWQRKVTLHTG

SEQ ID NO: 958 - protein, 318 aa, Artificial Sequence
  Synthetic
FAPLRAARNDSSVAEFILLGFSAFPELQGQMFGAFLVIYLVTLMGNATIVAVILLDQSLHIPMYLFLQNLSVVEMSFSAAITPEMLVVLTSEKATISFGGCFAQMYFILLFGGTECFLLGAMAYDRFAAICHPLSYPMIMNKRVFVKLVIFSWVSGIMVATVQTTWVFSFPYCDHKEINHLFCETPPVLELACADTFLFEVYAFTGTILIVMVPFLLILLSYTRILFSILRMPSTTGRQKAFSTCASHLTSVTLFYGTASITYLQPKSRYSPDTKKLMSLAYTLLTPLLNPLIYSLRNKEMKRAVLKLWQRKVALHRG

SEQ ID NO: 959 - protein, 318 aa, Artificial Sequence
  Synthetic
STTAMRGQNDSSVAEFILLGFSNYPELQRQMFGAFLVIYLVTLTGNALIMSVILLDRSLHIPMYLFLQNLSVVETGFSTTVMPEMLVVLTSEKATISFGGCFAQMYFILLFGGTECFLLGAMAYDRFAAICHPLSYPVIMNKRVFMTLVTCSWLSGTMMTTLQTIWVFSFPYCGSNEINHISCETPAVLELACTDIFFFEIYAFTGTVLIILTPFVLILLSYIRILFSILKMPSTTGRQKAFSTCASHLTSVTLFYGTASMTYLQPKSKYSPDTKKLMSLAYSLLTPLLNPLIYSLRNKEMKRAVVKLWERKVALHTT

SEQ ID NO: 960 - protein, 310 aa, Artificial Sequence
  Synthetic
MGQNDSSVVEFILLGFSHFPELQVHMFGAFLVIYLVTLTGNATIVTVIFLDHSLHIPMYLFLQNLSVVEASFSTTVMPEMLVVLTSEKATISFGGCFAQTYFILLFGGTECFLLGAMAYDRFAAICYPLTYPMIMSKRIFVKLVVCSWVLGIMTATVSVTWVFSFPFCGPSKINHISCEVPAVLELACADTFLFEVYSFTGTILLVLVPFLLILLSYTQILFTVLRMPSTTGRQKAFSTCASHLTSVTLFYSTACMTYLQPKSKYSPDTKKLMSLAYSLLTPLLNPLIYSLRNKEMKRAVVKLCQIKVVF

SEQ ID NO: 961 - protein, 310 aa, Artificial Sequence; identical to SEQ ID NO: 960
  Synthetic

SEQ ID NO: 962 - protein, 314 aa, Artificial Sequence
  Synthetic
MERQNQSCVVEFILLGFSNYPELQGQLFVAFLVIYLVTLIGNAIIIVIVSLDQSLHVPMYLFLLNLSVVDLSFSAVIMPEMLVVLSTEKTTISFGGCFAQMYFILLFGGAECFLLGAMAYDRFAAICHPLNYQMIMNKGVFMKLIIFSWALGFMLGTVQTSWVSSFPFCGLNEINHISCETPAVLELACADTFLFEIYAFTGTFLIILVPFLLILLSYIRVLFAILKMPSTTGRQKAFSTCAAHLTSVTLFYGTASMTYLQPKSGYSPETKKVMSLSYSLLTPLLNLLIYSLRNSEMKRALMKLWRRRVVLHTI

SEQ ID NO: 963 - protein, 314 aa, Artificial Sequence; identical to SEQ ID NO: 962
  Synthetic

SEQ ID NO: 964 - protein, 314 aa, Artificial Sequence
  Synthetic
MKRQNQSCVVEFILLGFSNFPELQVQLFGVFLVIYVVTLMGNAIITVIISLNQSLHVPMYLFLLNLSVVEVSFSAVITPEMLVVLSTEKTMISFVGCFAQMYFILLFGGTECFLLGAMAYDRFAAICHPLNYPVIMNRGVFMKLVIFSWISGIMVATVQTTWVFSFPFCGPNEINHLFCETPPVLELVCADTFLFEIYAFTGTILIVMVPFLLILLSYIRVLFAILKMPSTTGRQKAFSTCASHLTSVTLFYGTANMTYLQPKSGYSPETKKLISLAYTLLTPLLNPLIYSLRNSEMKRTLIKLWRRKVILHTF

SEQ ID NO: 965 - protein, 309 aa, Artificial Sequence
  Synthetic
MDEENQTTTTEFLLLGFSDLRALQGPLFWLVLLVYLITFLGNSLIIFLTQTSPVLHSPMYFFLRHLSMVELLYTTDIVPRVLADLTSHPQAISFRSCAAQMYFFIVLGISECCLLTAMAYDRYAAICQPLHYSTLMNHRACIAMVGTSWIMGIITATTHSSLIFTLPFPSRPIIPHFLCDILPVLRLASAGKHRSEISVMTATVVFIMIPFSLIVTSYARILGAILAIASSQSRRKVFSTCSSHLLVVSLFFGTASITYIRPRAGSSVTTDRILSLFYTVVTPMLNPIIYTLRNKEVIGALKHMKRQVP

SEQ ID NO: 966 - protein, 309 aa, Artificial Sequence; identical to SEQ ID NO: 965
  Synthetic

SEQ ID NO: 967 - protein, 312 aa, Artificial Sequence
  Synthetic
MAGENHTTLPEFLLLGFSDLKALQGPLFWVVLLVYLVTLLGNSLIILLTQVSPALHSPMYFFLRQLSVVELFYTTDIVPRTLANLGSHPQAISFQGCAAQMYVFIVLGISECCLLTAMAYDRYVAICQPLRYSTLLSPRACMAMVGTSWLTGIITATTHASLIFSLPFRSHPIIPHFLCDILPVLRLASAGKHRSEISVMTATIVFIMIPFSLIVTSYIRILGAILAMASTQSRRKVFSTCSSHLLVVSLFFGTASITYIRPQAGSSVTTDRVLSLFYTVITPMLNPIIYTLRNKDVRRALRHLVKRQRPSP

SEQ ID NO: 968 - protein, 309 aa, Artificial Sequence
  Synthetic
MGDDNDTDITEFILLGFSGYGFLQGHLFWGVLCIYVVTLLGNSLIVLLTLADSALHSPMYFFLRHFSVVEILYTTTIVPRMLADLRSSCPTIPLASCFTQLYFFALFGIAECCLLTAMAYDRYAAICCPLHYTTLMSQGTYTGLVGASYLAGVISGTTHSIFIFTLPFRGAKTIHHFLCDILPVLRLATASTFWGEVGNLFVTITFIFAPFLLIVASYACILATILGVATSQGRQKLFSTCSSHLFVVILFFGTGTVAYMRPQADSFGDTDQIITLFYTVVTPMCNPFVYTLRNKEVTGAMRRLVKRYF

SEQ ID NO: 969 - protein, 313 aa, Artificial Sequence
  Synthetic
FWEAPPWANQSRARELEFVLLGFAHVPSLRPMLAALFLAAFLLTMSGNSLIVLLTSLDFGLRTPMYFFLRQLALVEICFSLDVAPRLLVTLLQPGRGVSPTSCALQLLLVLSCVTSECFLLMVMAWDRFLAICRPLRYGAIMSPQLCYLLATTCWLAGIPVALVFTIWLFNFPFCGPRGIRHFFCDIAPLLSLVCADTRVFEANVFVATVLVIMVPFCLIATSYVMILVAVLRMPSASGRHKALSTCASHLIVVILFYGTTGVIHLRPKASYSPESKQVVSLSYTMVTPMLNPLIYSLRNKEVKAAFGRVCCG

SEQ ID NO: 970 - protein, 313 aa, Artificial Sequence
  Synthetic
MEQVNKTVVREFVVLGFSSLARLQQLLFVIFLLLYLFTLGTNAIIISTIVLDRALHTPMYFFLAILSCSEICYTFVIVPKMLVDLLSQKKTISFLGCAIQMFSFLFFGSSHSFLLAAMGYDRYMAICNPLRYSVLMGHGVCMGLMAAACACGFTVSLVTTSLVFHLPFHSSNQLHHFFCDISPVLKLASQHSGFSQLVIFMLGVFALVIPLLLILVSYIRIISAILKIPSSVGRYKTFSTCASHLIVVTVHYSCASFIYLRPKTNYTSSQDTLISVSYTILTPLFNPMIYSLRNKEFKSALRRTIGQTFYPLS

SEQ ID NO: 971 - protein, 313 aa, Artificial Sequence; identical to SEQ ID NO: 970
  Synthetic

SEQ ID NO: 972 - protein, 312 aa, Artificial Sequence
  Synthetic
MERVNETVVREVIFLGFSSLARLQQLLFVIFLLLYLFTLGTNAIIISTIVLDRALHIPMYFFLAILSCSEICYTFIIVPKMLVDLLSQKKTISFLGCAIQMFSFLFLGCSHSFLLAVMGYDRYIAICNPLRYSVLMGHGVCMGLVAAACACGFTVAQIITSLVFHLPFYSSNQLHHFFCDIAPVLKLASHHNHFSQIVIFMLCTLVLAIPLLLILVSYVHILSAILQFPSTLGRCKAFSTCVSHLIIVTVHYGCASFIYLRPQSNYSSSQDALISVSYTIITPLFNPMIYSLRNKEFKSALCKIVRRTISLL

SEQ ID NO: 973 - protein, 312 aa, Artificial Sequence; identical to SEQ ID NO: 972
  Synthetic

SEQ ID NO: 974 - protein, 314 aa, Artificial Sequence
  Synthetic
MECVNDTVVREFVFLGFSSLAELQLLLFAIFLSLYLFTLSTNAVIVSTIVLDRALHTPMYFFLSVLSCSETCYTFVIVPKMLVDLLARKKSISFLGCAIQMFTFLFLGCSHSFLLAAMGYDRYVAICHPLRYTVLMGHRVCVGLVAAACVCGFTVAQVITSLVFRLPFRSSNQLHHFFCDISPVLQLASHHPHSTQITIFLLCALVLVIPLFLILVSYIHIISTILQFPSTLGRYKAFSTCASHLIVVIVHYGCASFIYLRPKSSYSSSQDALISVSYTILTPLFNPVIYSLRNKDFKSALHRVIGRTVTLRQH

SEQ ID NO: 975 - protein, 312 aa, Artificial Sequence
  Synthetic
MRGFNKTTVVTQFILVGFSSLGELQLLLFVIFLLLYLTILVANVTIMAVIRFSWTLHTPMYGFLFILSFSESCYTFVIIPQLLVHLLSDTKTISFMACATQLFFFLGFACTNCLLIAVMGYDRYVAICHPLRYTLIINKRLGLELISLSGATGFFIALVATNLICDMRFCGPNRVNHYFCDMAPVIKLACTDTHVKELALFSLSILVIMVPFLLILISYGFIVNTILKIPSAEGKKAFVTCASHLTVVFVHYGCASIIYLRPKSKSASDKDQLVAVTYTVVTPLLNPLVYSLRNKEVKTALKRVLGMATKMS

SEQ ID NO: 976 - protein, 312 aa, Artificial Sequence; identical to SEQ ID NO: 975
  Synthetic

SEQ ID NO: 977 - protein, 319 aa, Artificial Sequence
  Synthetic
PPLQILAENLTMVTEFLLLGFSSLGEIQLALFVVFLFLYLVILSGNVTIISVIHLDKSLHTPMYFFLGILSTSETFYTFVILPKMLINLLSVARTISFNCCALQMFFFLGFAITNCLLLGVMGYDRYAAICHPLHYPTLMSWQVCGKLAAACAIGGFLASLTVVNLVFSLPFCSANKVNHYFCDISAVILLACTNTDVNEFVIFICGVLVLVVPFLFICVSYLCILRTILKIPSAEGRRKAFSTCASHLSVVIVHYGCASFIYLRPTANYVSNKDRLVTVTYTIVTPLLNPMVYSLRNKDVQLAIRKVLGKKGSLKLYN

SEQ ID NO: 978 - protein, 319 aa, Artificial Sequence
  Synthetic
PPLQILAENLTMVTEFLLLGFSSLGEIQLALFVVFLFLYLVILSGNVTIISVIHLDKSLHTPMYFFLGILSTSETFYTFVILPKMLINLLSVARTISFNCCALQMFFFLGFAITNCLLLGVMGYDRYAAICHPLHYPTLMSWQVCGKLAAACAIGGFLASLTVVNLVFSLPFCSTNKVNHYFCDISAVILLACTNTDVNGFVIFICGVLVLVVPFLFICVSYFCILRTILKIPSAEGRRKAFSTCASHLSVVIVHYGCASFIYLRPTANYVSNKDRLVTVTYTIVTPLLNPMVYSLRNKDVQLAIRKVLGKKGSLKLYN

SEQ ID NO: 979 - protein, 309 aa, Artificial Sequence
  Synthetic
MKRKNFTEVSEFIFLGFSSFGKHQITLFVVFLTVYILTLVANIIIVTIICIDHHLHTPMYFFLSMLASSETVYTLVIVPRMLLSLIFHNQPISLAGCATQMFFFVILATNNCFLLTAMGYDRYVAICRPLRYTVIMSKGLCAQLVCGSFGIGLTMAVLHVTAMFNLPFCGTVVDHFFCDIYPVMKLSCIDTTINEIINYGVSSFVIFVPIGLIFISYVLVISSILQIASAEGRKKTFATCVSHLTVVIVHCGCASIAYLKPKSESSIEKDLVLSVTYTIITPLLNPVVYSLRNKEVKDALCRVVGRNIS

SEQ ID NO: 980 - protein, 309 aa, Artificial Sequence; identical to SEQ ID NO: 979
  Synthetic

SEQ ID NO: 981 - protein, 309 aa, Artificial Sequence
  Synthetic
MQRNNFTEVIEFVFLGFSSFGKHQITLFVVFLTIYILTLAGNIIIVTITHIDHHLHTPMYFFLSMLASSETVYTLVIVPRMLSSLIFYNLPISLAGCATQMFFFVTLATNNCFLLTAMGYDRYVAICNPLRYTIIMSKGMCALLVCGSLGTGLVMAVLHVPAMFHLPFCGTVVEHFFCDIYPVMKLSCVDTTVNEIINYGVSSFVILVPIGLIFISYVLIVSSILKIVSTEGQKKAFATCASHLTVVIVHYGCASIAYLKPKSESSVEKDLLLSVTYTIITPLLNPVVYSLRNKEVKDALCRAVGRNTS

SEQ ID NO: 982 - protein, 309 aa, Artificial Sequence
  Synthetic
MKRENFTLITDFVFQGFSSFHEQQITLFGVFLALYILTLAGNIIIVTIIRMDLHLHTPMYFFLSMLSTSETVYTLVILPRMLSSLVGMSQPISLAGCATQMFFFVTFGITNCFLLTAMGYDRYVAICNPLRYMVIMNKRLRIQLVLGACSIGLIVAITQVTSVFRLPFCARKVPHFFCDIRPVMKLSCIDTTVNEILTLIISVLVLVVPMGLVFISYVLIISTILKIASVEGRKKAFATCASHLTVVIVHYSCASIAYLKPKSENTREHDQLISVTYTVITPLLNPVVYTLRNKEVKDALCRAVGGKFS

SEQ ID NO: 983 - protein, 310 aa, Artificial Sequence
  Synthetic
MMRRNHTVISEFVFQGFSSFQEYKFTLFMVFLTLYLLTLTGNAIIMIIIGIDRHLHTPMYFFLSMLSTSETVYTLVIVPRMLASLVGSSQPISLAGCATQMFFFITLAINNCFLLTAMGYDRYVAICNPLRYSVIMNKRVCAQLVWGSCNIGLLVAIIQIASVFRAPFCDREVAHYFCDIRPVMKLSCADTTLHDIVNFIISSLVIVVPMGLVFISYILIISTILKIASAEGRKKAFATCASHLTVVIIHYGCASIAYLKPKSENTRDQDQLISVTYTVFTPLLNPVVYTLRNKEVKDAIYRAIGKNPLA

SEQ ID NO: 984 - protein, 312 aa, Artificial Sequence
  Synthetic
MLKSNTTFVTEFLFEGFSGFWQHRLAFFAIFLALYFLTLSGNVIIVSIIHLDHHLHTPMYFFLAILSISDTCYTVTIIPRMLSDLLNPYHTIAFRDCVVQIFFYLTFGINNCFLLMVMGYDRYVAICNPLRYSVIMGRKACVHLASGSLGIGLGMAIVQVTSVFSLPFCDRFVIPHFFCDVRPLLKLACTDTTINEIINFVVSVFVLILPMGVVFISYVVIISTILKIASAEGRKKAFATCASHLTVVIIHYGCTAIIYMKPKSQSLLGQERLISVTYTLITPLLNPLVYTLRNKEVKDALRRAMWQKPLSS

SEQ ID NO: 985 - protein, 312 aa, Artificial Sequence
  Synthetic
MPKKNSTVVAEFLFEGFSSFWQHRLGFFIVFLTLYLLTLSGNMIIVTIIRLDRHLHTPMYFFLSMLSISETFYTIAIIPRMLAGLLNPYQAIDIQGCATQLFFYLTFGINNCFLLTAMGYDRYVAICNPLRYSVIMGKKACILLASGSLGIGLSMAIVQVTSVFGLPFCDGFVIAHFFCDVRPLLKLACTDTTINEIINFIVSVCVLVLPMSLVFISYVVIISTILKIASAEGRKKAFATCASHLTVVIIHYGCASIIYLKPKSQTSLGQDRLISVTYTVITPLLNPVVYSLRNKEVKEALRKAIGRRPLSS

SEQ ID NO: 986 - protein, 310 aa, Artificial Sequence
  Synthetic
MKRANCTEVREFVFQGFSNFQEHQLTLFIIFFALYILTLTGNVIIVTIIRIDHHLHTPMYFFLSVLSTSETFYSLVIIPRMLGSLVGLSQTISLECCGTQLFFFLGFGITNCFLLAVMGYDRYVAICNPLRYSVIMNWRVCVILASSVCATGFLLSLVQALAIFRLPFCNTLIKHFFCDVRPILDLACTVPVINQVLTLVLTLMVLTAPAIFLFVSYALIISTILKIASSDGWKKTFATCSSHLTVVVIHYGCASIVYFKPKSENSKDQDQLLSVTYTVITPLLNPVVYSLRNKEVQDALRKVLCRKSLS

SEQ ID NO: 987 - protein, 310 aa, Artificial Sequence
  Synthetic
MKKTNCTHVREFVFQGFSNFQEHQLTLFVVFFVLYILTLAGNVIIVTIIRIDHHLHTPMYFFLSVLSTSETFYSLVIIPRMLGSLVGLSQTISLECCGTQLFFFLGFAITNCLLLAVMGYDRYVAICNPLRYSVIMNWRVCVILASSVGATGFLLSLIQAVAIFRLPFCNTLIEHFFCDVRPILDLACTVPVINDILTLALSLMVITAPATFLFVSYVLIISTILKIASAEGRRKTFATCASHLTVVVIHYGCASIAYFKPKSENTRDQDQLISVTYTVITPLLNPVVYSLRNKEVQDALRKVLGKKSLS

SEQ ID NO: 988 - protein, 313 aa, Artificial Sequence
  Synthetic
MGQTNVTSWRDFVFLGFSSSGELQLLLFALFLSLYLVTLTSNVFIIIAIRLDSHLHTPMYLFLSFLSFSETCYTLGIIPRMLSGLAGGDQAISYVGCAAQMFFSASWACTNCFLLAAMGFDRYVAICAPLHYASHMNPTLCAQLVITSFLTGYLFGLGMTLVIFHLSFCSSHEIQHFFCDTPPVLSLACGDTGPSELRIFILSLLVLLVSFFFITISYAYILAAILRIPSAEGQKKAFSTCASHLTVVIIHYGCASFVYLRPKASYSLERDQLIAMTYTVVTPLLNPIVYSLRNRAIQTALRNAFRGRLLGKG

SEQ ID NO: 989 - protein, 313 aa, Artificial Sequence; identical to SEQ ID NO: 988
  Synthetic

SEQ ID NO: 990 - protein, 313 aa, Artificial Sequence
  Synthetic
MVESNVTCWQGFVFLGFSSFGELQLLLFVLFLSLYLVTITSNVFIIIVIRLDSHLHTPMYLFLSFLSFSETCYTLGIIPRMLSGLVMGGQAISFMGCATQMFFSASWACTNCFLLSVMGFDRYVAICAPLHYASRMNPTVCAQLVGTSFLSGYLFGLGMTLVIFRLSFCSSHEIQHFFCDTPPVLSLACGDTRLSELGILILSLLVLLVSFFLISVSYAYILVAILRIPSAEGRRKAFSTCASHLTVVVIHYGCASFMYLRPKASYSLERDQLIAVTYTVATPLLNPIVYSLRNRAVQTALRNAFRGSLLGKG

SEQ ID NO: 991 - protein, 317 aa, Artificial Sequence
  Synthetic
MGNHTTVNMFLLWGFSSFPELHNLLFVVVLLSHVTIILANAFIMVAIKLNHNLHAPMYFFLFALSFSETCTTMVILPRLLVDLISKNKAISLPECATQMFFFFGLGGNNCFILSAMSYDRYTAIHNPLHYPILMTQKICLHLIVASGVLGFSISLCIVITIFNLSFCNSNIIQHFFCDIDPVVSLACNLTFYHKVILFALTAFVLVGSFIFIMVSYVFIVTVVIKMPSAKGRYKTFSTCSSHFTVVFIHYGFASFVYLRPKNSYSFRDATLLAVTYTILTPLLNPIIYSLRNKGIQTALKKDIGNRFFSKMVNKKAQ

SEQ ID NO: 992 - protein, 317 aa, Artificial Sequence
  Synthetic
MGNHSTVTTFLLWGFSSFPELHNLLFVVILLSHVTILLANASIMVAIKLNHNLHTPMYFFLFALSFSETCTTMVILPRMLVDLLSESKAISLPECATQMFFFFGLAANNCFIMAAMSYDRYTAIHSPLHYHIFMTPKVCSQLVIASCVVGFLCSLSITFTIFNLSFCDSKTIQHFFCDISPLVHLACDYTAHHAMIIFMVSAFVLVGSFVLIMISYAFIVFLVVKMPSVQGRHKAFSTCSSHLTVVSMHYGFACFVYLIPKNSDSFREDMLMAVTYTVLTPLLNPIVYSLRNKEMQTALRKVLSSINKMLPCLAIKK

SEQ ID NO: 993 - protein, 315 aa, Artificial Sequence
  Synthetic
MPSQNYSIISEFNLFGFSAFPHLLPILFLLYLLMFLFTLLGNLLIMATIWIEHRLHTPMYLFLCTLSVSEILFTVAITPRMLADLLSTHHSITFVACANQMFFSFMFGFTHSFLLLVMGYDRYVAICHPLRYNVLMSPRDCAHLVACTWAGGSVMGMMVTTIVFHLTFCGSNVIHHFFCHVLSLLKLACENKTSSVIMVMLVCVTALIGCLFLIILSYVFIVAAILRIPSAEGRHKTFSTCVSHLTVVVTHYSFASFIYLKPKGLHSMYSDALMATTYTVFTPFLSPIIFSLRNKELKNAINKNFYRKFCPPSSA

SEQ ID NO: 994 - protein, 314 aa, Artificial Sequence
  Synthetic
MPSQNYSIISEFNLFGFSAFPHLLPILFLLYLLMFLFTLLGNLLIMATIWIEHRLHTPMYLFLCTLSVSEILFTVAITPRMLADLLSTHHSITFVACANQMFFSFMFGFTHSFLLLVMGYDRYVAICHPLRYNVLMSPRDCAHLVACTWAGGSVMGMMVTTIVFHLTFCGSNVIHHFFCHVLSLLKLACENKTSSVIMVMLVCVTALIGCLFLIILSYVFIVAAILRIPSAEGRHKTFSTCVSHLTVVVTHYSFASFIYLKPKGLHSMYSDALMATTYTVFTPFLSPIIFSLRNKELKNAINKNFYRKFCPPSS

SEQ ID NO: 995 - protein, 314 aa, Artificial Sequence
  Synthetic
MPGQNYRTISEFILSGFSAFPQLLPVLFLLYLLMFLFTLLGNLLIMATVWIERRLHTPMYLFLCALSISEILFTVAITPRMLADLLFTHRSITFVACAIQMFFSFMFGFTHSFLLMVMGYDHYVTICHPLHYNMLMSPRGCAHLVAWTWAGGSVMGMMVTMMVFHLTFCGSNVIHHFLCHVLSLLKLACGSKTSSVIMVMLVCVTALIGCLFLIILSFVFIVAAILRIPSAEGRHKTFSTCVSHLTVVVMHYSFASLIYLKPKGLHSMYSDALMATTYTVFTPFLSPIIFSLRNKELKNAINKNFCRRFCPLSS

SEQ ID NO: 996 - protein, 314 aa, Artificial Sequence
  Synthetic
MPGQNYSTISEFILFGFSAFPQMLPALFLLYLLMYLFTLLGNLVIMAAIWTEHRLHTPMYLFLCALSISEILFTVVITPRMLSDMLSTHRSITFIACANQLFFSFTFGYTHSFLLVVMGYDRYVAICRPLHYHALMSLQGCARLVAWSWAGGSLIGMALTIIIFHLTFCESNVIHHILCHVFSLLKLACGERTFVTIAVILVCVTPLIGCLVFIILSYIFIVAAILRIPSTEGRHKTFSTCASHLTVVIVHYGFASIIYLKSRGLYSQYTDTLMSTTYTVFTPFLSPIIFSLRNKELKNAIIKSFHRNVCQQSI

SEQ ID NO: 997 - protein, 314 aa, Artificial Sequence; identical to SEQ ID NO: 996
  Synthetic

SEQ ID NO: 998 - protein, 314 aa, Artificial Sequence
  Synthetic
MQGLNHTSVSEFILVGFSAFPHLQLMLFLLFLLMYLFTLLGNLLIMATVWSERSLHMPMYLFLCALSITEILYTVAIIPRMLADLLSTQRSIAFLACASQMFFSFSFGFTHSFLLTVMGYDRYVAICHPLRYNVLMSLRGCTCRVGCSWAGGLVMGMVVTSAIFHLAFCGHKEIHHFFCHVPPLLKLACGDDVVVAKGVGLVCITALLGCFLLILLSYAFIVAAILKIPSAEGRNKAFSTCASHLTVVVVHYGFASVIYLKPKGPQSPEGDTLMGITYTVLTPFLSPIIFSLRNKELKVAMKKTCFTKLFPQNC

SEQ ID NO: 999 - protein, 314 aa, Artificial Sequence
  Synthetic
MQGLNHTSVSEFILVGFSAFPHLQLMLFLLFLLMYLFTLLGNLLIMATVWSERSLHMPMYLFLCALSITEILYTVAIIPRMLADLLSTQRSIAFLACASQMFFSFSFGFTHSFLLTVMGYDRYVAICHPLRYNVLMSLRGCTCRVGCSWAGGLVMGMVVTSAIFHLAFCGHKEIHHFFCHVPPLLKLACGDDVVVAKGVGLVCITALLGCFLLILLSYAFIVDAILKIPSAEGRNKAFSTCASHLTVVVVHYGFASVIYLKPKGPQSPEGDTLMGITYTVLTPFLSPIIFSLRNKELKVAMKKTCFTKLFPQNC

SEQ ID NO: 1000 - protein, 317 aa, Artificial Sequence
  Synthetic
MQRANHSTVTQFILVGFSVFPHLQLMLFLLFLLMYLFTLLGNLLIMATVWSERSLHTPMYLFLCALSVSEILYTVAIIPRMLADLLSTQRSIAFLACASQMFFSFSFGFTHSFLLTVMGYDRYVAICHPLRYNVLMSPRGCACLVGCSWAGGLVMGMVVTSAIFHLAFCGHKEIHHFACHVPPLLKLACGDDVVVAKGVGLVCITALLGCFLLILLSYAFIVAAILKIPSAEGRNKAFSTCASHLTVVVVHYGFASVIYLKPKSPQSLEGDTLMGITYTVLTPFLSPIIFSLRNKELKVAMKKTFFSKLYPEKNVMM

SEQ ID NO: 1001 - protein, 317 aa, Artificial Sequence; identical to SEQ ID NO: 1000
  Synthetic

SEQ ID NO: 1002 - protein, 314 aa, Artificial Sequence
  Synthetic
MLGLNHTSMSEFILVGFSAFPHLQLMLFLLFLLMYLFTLLGNLLIMATVWSERSLHTPMYLFLCVLSVSEILYTVAIIPRMLADLLSTQRSIAFLACASQMFFSFSFGFTHSFLLTVMGYDRYVAICHPLRYNVLMSPRGCACLVGCSWAGGSVMGMVVTSAIFQLTFCGSHEIQHFLCHVPPLLKLACGNNVAVALGVGLVCIMALLGCFLLILLSYAFIVADILKIPSAEGRNKAFSTCASHLIVVIVHYGFASVIYLKPKGPHSQEGDTLMATTYAVLTPFLSPIIFSLRNKELKVAMKRTFLSTLYSSGT

SEQ ID NO: 1003 - protein, 317 aa, Artificial Sequence
  Synthetic
MAVMLGLNYTFVSEFILIGFSTFPHLQLMFFLLFLLMYLFTLLGNLLIMTTIWSEHSLHTPMYLFLCALSISEIFYTFAIIPRMLADLLTTLHSIAFLACASQMFFSFTFGFTHSFLLTVMGYDRYVAICHPLRYNVLMSPRGCACLVAWSWVGGSFMGTVVTTAIFNLTFCGPNEIHHFTCHVPPLLKLACGENVEVAKGVEIVCITALLGCFLLILLSYAFIVVTILKIPSAEGRHKAFSTCASHLTVVVVHYGFASVIYLKPKGPKSLEGDTLMGITYTVLTPFLSPIIFSLRNKELKNAMKKIFLSKLYPEKI

SEQ ID NO: 1004 - protein, 316 aa, Artificial Sequence
  Synthetic
MAVMLGLNYTFVSEFILIGFSTFPHLQLMFFLLFLLMYLFTLLGNLLIMTTIWSEHSLHTPMYLFLCALSISEIFYTFAIIPRMLADLLSTLHSIAFLACASQMFFSFTFGFTHSFLLTVMGYDRYVAICHPLRYNVLMSPRGCACLVAWSWVGGSFMGTVVTTAIFNLTFCGPNEIHHFTCHVPPLLKLACGENVLEVAVEIVCITALLGCFLLILLSYAFIVVTILKIPSAEGRHKAFSTCASHLTVVVVHYGFASVIYLKPKGPKSLEGDTLMGITYTVLTPFLSPIIFSLRNKELKNAMKKIFLSKLYPEKI

SEQ ID NO: 1005 - protein, 309 aa, Artificial Sequence
  Synthetic
MINQTILQEFILIGFSAYPLVQTCLFVVFLCLYMVALASNLTIMGLTWADRYLHTPMYYFLSALSFSETCYTLTIIPKMLVDLLDKDNRISDIGCGLQMCFFLGLGGTNCILLTVMGYDRFLAICNALKYPLLMTNVACGQHVATAWVGGFLISLIETTLIFRVSFCIPNLIRHFFCHMRAVLRLSCTDSNFTEFIVTLMSVSGLLGTFLLILLTYVFILSSVLKTPSAEGKQKAFTPCASHLTVAIIHFVFAPVVYLKPENSGGDDTLIAVPYTVITPFLSPIIFTLRNKDIKNAFRKIMRKTVVLKK

SEQ ID NO: 1006 - protein, 309 aa, Artificial Sequence
  Synthetic
MKINQTILKEFILVGFSVYPHVQTFLFVVFFCLYLLTLAGNLIIMGLTWVDRSLHTPMYLFLSALSFSETCYTLTIVPKMLEDLLAKDRSISVTGCSLQMCFFLGLGGTNCIILTLMGYDRFLAICNPLRYPLLMTNIVCGQLVASACTAGFFISLTETALIFRDSFCRPNLVKHFFCHMLAVIRLSCIDSNHTEFIITLISVSGLLGTLLLIILTDVFIISTVLRIPSAEGKQKAFTTCASHLTVVIIHFGFASIVYLKPEASGDDTLIAVPYTVITPFLSPIIFSLRNKDMKNAFRRMMGNTVALKK

SEQ ID NO: 1007 - protein, 308 aa, Artificial Sequence
  Synthetic
MSNHTRVTHFILRGFSDVPQLRLVLIPFFLLFYTFGILGNFSIITAVIRDSRLHSPMYFFLKNLSFLDICYTSATIPKAVVISLTGSGVISYQECVAQLYMFITLCGTECFLLTAMAYDRCLAILRPLIYGTIMSHKYCSALVVTAWVGGAIYSAFHTFNTFSLPYCGPNVVDHFFCDMPPVMRLSCTDYHLNEEVGFAVIGCIIMSSFALTVVSYIGIVATVLRIPSVEGRWKAFSTCSSHLTTVILFYGTGSFVYLRPASQYSPTLDPLASIFYSVVTPSLNPVIYCLRNKDMKFALQKLYCGRKY

SEQ ID NO: 1008 - protein, 308 aa, Artificial Sequence
  Synthetic
MANHTRVTHFILRGFSDVPQLRLVLIPFFLLFYTFGILGNFSIITAVIRDSRLHSPMYFFLKNLSFLDICYTSATIPKAVVISLTGSGVISYQECVAQLYMFITLCGTECFLLTAMAYDRCLAILRPLIYGTIMSHKYCSALVVTAWVGGAIYSAFHTFNTFSLPYCGPNVVDHFFCDMPPVMRLSCTDYHLNEEVGFAVIGCIIMSSFALTVVSYIGIVATVLHIPSVEGRWKAFSTCSSHLTTVILFYGTGSFVYLRPASQYSPTLDPLASIFYSVVTPSLNPVIYCLRNKDMKFALQKLYCGRKY

SEQ ID NO: 1009 - protein, 308 aa, Artificial Sequence
  Synthetic
MSNHTRVTHFILRGFSDIPQLRLMAIPVFLLIYTFGLLGNLSIITAVTRDSRLHSPMYFFLKNLSFLDICYTSATIPKAVVISLTGSGVISYQECVAQLYIFLTFSSSECFLLTAMAYDRCLAILRPLIYGTIMSHKYCSALVVTAWVGGAIYSAFHTFNTFSLPYCGPNVIDHFFCDIPPVMRLSCTDYHLSEEVGFAVSSCIVMSSFALTVVSYIGIVATVLCIPSVEGRWKAFSTCSSHLTTVILFYGTGSFVYLRPASQYSPTLGPLASIFYSVVTPSLNPVVYCLRNKDMKFALQKLYCGRKY

SEQ ID NO: 1010 - protein, 308 aa, Artificial Sequence
  Synthetic
MSNHTRVTHFILRGFSDVPQLRLVLIPFFLFFYTFGILGNFSIITAVTRDSRLHSPMYFFLKNLSFLDICYTSATIPKAVVISLTGSGVISYQECAAQLYIIFTFACTECFLLTAMAYDRCLAILRPLIYGTIMSQKYCSALVVTAWVGGAIYSAFHTFNTFSLPYCGPNVIDHFFCDMPPVMRLSCTDYHLTEEVGFAVSSCIVMSSFVLTVVSYIGIVATVLRIPSVEGRWKAFSTCSSHLTTVILFYGTGSFVYLRPASQYSPTLGRLASIFYSVVTPSLNPVVYCLRNKDMKFALQKLYCGRKY

SEQ ID NO: 1011 - protein, 308 aa, Artificial Sequence
  Synthetic
MANLSTVSVFILQGFSAVPALQLLSMAIFLLIYLAAVLGNVSIMIAVTLDSHLHTPMYFFIKHLSLVDLCSTSTTLPRALVATMADTKEISLPACASQLFAFVCFGSLECFLITAMAFDRCLAIYRPLTYGVTMSSQTCVSLVVVAWVSGLLFSTFHMVNTFSLPFCGPNMIDHFFCDIPPLMHLACGDTQGHEAAGFIVSGCVIMTCFALTCLSYVLIVYTVVHIRSAAGRWKAFSTCSSHLATVLLFYGTGSSAYMQPTAHYSPLQGRMAAIFYSILMPTLNPLIYSLRNKDMKAALRKLYPQVPS

SEQ ID NO: 1012 - protein, 310 aa, Artificial Sequence
  Synthetic
MSNATLLTAFILTGLPHAPGLDAPLFGIFLVVYVLTVLGNLLILLVIRVDSHLHTPMYYFLTNLSFIDMWFSTVTVPKMLMTLVSSGRTISFHSCVAQLYFFHFLGSTECFLYTVMSYDRYLAISYPLRYTNMMTGRSCALLATGTWLSGSLHSAVQTILTFHLPYCGPNQIQHYFCDAPPILKLACADTSANEMVIFVNIGLVASGCFVLIVLSYVSIVCSILRIRTSEGRHRAFQTCASHCIVVLCFFGPGLFIYLRPGSRDALHGVVAVFYTTLTPLFNPVVYTLRNKEVKKALLKLKNGSVFAQGE

SEQ ID NO: 1013 - protein, 309 aa, Artificial Sequence
  Synthetic
MSNATLLTAFILTGLPHAPGLDAPLFGVFLVVYVLTVLGNLLILLVIRVDSHLHTPMYYFLTNLSFIDMWFSTVTVPKMLMTLVSPGRTISFHSCVAQLYFFHFLGSTECFLYTVMSYDRYLAISYPLRYTNMMTGRSCALLATGTWLSGSLHSAVQTILTFHLPYCGPNQIQHYFCDAPPILKLACADTSANEMVIFVNIGIVASGCFVLIVLSYVSIVCSILRIRTSEGRHRAFQTCASHCIVVLCFFGPGLFIYLRPGSRDALHGVVAVFYTTLTPLFNPVVYTLRNKEVKKALLKLKNGSVFAQG

SEQ ID NO: 1014 - protein, 310 aa, Artificial Sequence
  Synthetic
MSNASLVTAFILTGLPHAPGLDALLFGIFLVVYVLTVLGNLLILLVIRVDSHLHTPMYYFLTNLSFIDMWFSTVTVPKMLMTLVSSGRAISFHSCVAQLYFFHFLGSTECFLYTVMSYDRYLAISYPLRYTSMMSGSRCALLATGTWLSGSLHSAVQTILTFHLPYCGPNQIQHYFCDAPPILKLACADTSANVMVIFVDIGIVASGCFVLIVLSYVSIVCSILRIRTSDGRRRAFQTCASHCIVVLCFFVPCVVIYLRPGSMDAMDGVVAIFYTVLTPLLNPVVYTLRNKEVKKAVLKLRDKVAHPQRK

SEQ ID NO: 1015 - protein, 310 aa, Artificial Sequence
  Synthetic
MSKTSLVTAFILTGLPHAPGLDAPLFGIFLVVYVLTVLGNLLILLVIRVDSHLHTPMYYFLTNLSFIDMWFSTVTVPKMLMTLVSSGRAISFHSCVAQLYFFHFLGSTECFLYTVMSYDRYLAISYPLRYTSMMSGSRCALLATSTWLSGSLHSAVQTILTFHLPYCGPNQIQHYLCDAPPILKLACADTSANEMVIFVDIGLVASGCFLLIVLSYVSIVCSILRIHTSEGRHRAFQTCASHCIVVLCFFVPCVFIYLRPGSRDVVDGVVAIFYTVLTPLLNPVVYTLRNKEVKKAVLKLRDKVAHSQGE

SEQ ID NO: 1016 - protein, 310 aa, Artificial Sequence
  Synthetic
MSNASLLTAFILMGLPHAPALDAPLFGVFLVVYVLTVLGNLLILLVIRVDSHLHTTMYYFLTNLSFIDMWFSTVTVPKLLMTLVFSGRAISFHSCMAQLYFFHFLGGTECFLYRVMSCDRYLAISYPLRYTSMMTGRSCTLLATSTWLSGSLHSAVQAILTFHLPYCGPNWIQHYLCDAPPILKLACADTSAIETVIFVTVGIVASGCFVLIVLSYVSIVCSILRIRTSEGKHRAFQTCASHCIVVLCFFGPGLFIYLRPGSRKAVDGVVAVFYTVLTPLLNPVVYTLRNKEVKKALLKLKDKVAHSQSK

SEQ ID NO: 1017 - protein, 310 aa, Artificial Sequence
  Synthetic
MSNVTLVTTFFLSGIPHPPALDTMLFVAFLVIYILTVLGNFLILMVIRVDSHLHTPMYYFLTNLSFIDMWFSTVTVPKMLMTLVSPRGAISFHSCVAQLYCFHFLGSTECFLYTVMSYDRYLAISYPLRYSSMMSGRVCALLAAGTWITGSLHSAVQTTLTFRLPYCGPNQIQHYFCDAPPILKLACADTSANEMVIFVNIGVVASGCFLLISLSYVSIVCSILRIRTSEGRHRAFQTCASHCIVVLCFFVPCVFIYLRPGSRDAVDGVVAVFYTVLTPLLNPVVYTLRNKEVKKALVKLKDKVAYSQSQ

SEQ ID NO: 1018 - protein, 310 aa, Artificial Sequence; identical to SEQ ID NO: 1017
  Synthetic

SEQ ID NO: 1019 - protein, 310 aa, Artificial Sequence
  Synthetic
MSNTSIVTTFFLSGLPHPPVLDSMLFGIFLVIYILTVLGNLLILTVIRVDSHLHTPMYYFLTNLSFIDMWFSTVTVPKMLMTLVSGGGAISFHSCVAQLYCFHFLGSTECFLYTVMSYDRYLAISYPLRYSSMMGGRMCALLAAGTWFTGSLHSAVQTTLTFHLPYCGPNQIQHYFCDAPPILKLACADTSANEMVIFVNIGVVASGCFFLISLSYVSIVCSILRIRTSEGRHRAFQTCASHCIVVLCFFGPGLFIYLRPGSRDAVDGIVAVFYTVLTPLLNPVVYTLRNKEVKKALLKIKYGSVLPQDK

SEQ ID NO: 1020 - protein, 297 aa, Artificial Sequence
  Synthetic
MLNGSVVTTFFLSGLPHPPVLDSMLFGIFLVIYILTVLGNLLILMVIRVDSHLHTPMYYFLTNLSFIDMWFSTVTVPKMLMTLVSGGGAISFHSCVAQLYCFHFLGSTECFLYTVMSYDRYLAISYPLRYSSMMSGRVCALLAAGTWITGSLHSAVQTTLIFHLPYCGPNEIQHYFCDGPPILKLACADTSAIEMVIFVNIGVVASGCFFLISLSYVSIVCSILRIRTSEGRHRAFQTCASHCIVVLCFFVPCVFIYLRPGSRDAVDSGDSFLHCVDTPTQPCCVHPEEQRGEESTV

SEQ ID NO: 1021 - protein, 312 aa, Artificial Sequence
  Synthetic
MERINSTLLTAFILTGIPYPLRLRTLFFVFFFLIYILTQLGNLLILITVWADPRLHRPMYIFLGVLSVIDMSISSIIVPRLMMNFTLGVKPIPFGGCVAQLYFYHFLGSTQCFLYTLMAYDRYLAICQPLRYPVLMTAKLSALLVAGAWMAGSIHGALQAILTFRLPYCGPNQVDYFFCDIPAVLRLACADTTVNELVTFVDIGVVVASCFSLILLSYIQIIQAILRIHTADGRRRAFSTCGAHVTVVTVYYVPCAFIYLRPETNSPLDGAAALVPTAITPFLNPLIYTLRNQEVKLALKRMLRSPRTPSEV

SEQ ID NO: 1022 - protein, 312 aa, Artificial Sequence
  Synthetic
MERINSTLLTAFILTGIPYPLRLRTLFFVFFFLIYILTQLGNLLILITVWADPRLHRPMYIFLGVLSVIDMGISSIIVPRLMMNFTLGVKPIPFGGCVAQLYFYHFLGSTQCFLYTLMAYDRYLAICQPLRYPVLMTAKLSALLVAGAWMAGSIHGALQAILTFRLPYCGPNQVDYFFCDIPAVLRLACADTTVNELVTFVDIGVVVASCFSLILLSYIQIIQAILRIHTADGRRRAFSTCGAHVTVVTVYYVPCAFIYLRPETNSPLDGAAALVPTAITPFLNPLIYTLRNQEVKLALKRMLRSPRTPSEV

SEQ ID NO: 1023 - protein, 312 aa, Artificial Sequence
  Synthetic
MERINYTVLTEFILTGVPHPPRLRTFLFVFFLLIYILTQLGNALILITVCADTQLHRPMYIFLGALSVIDMGISTIIVPRLMMNFTPGIKPIPFGGCVAQLYFYHFLGSSQCFLYTTMAYDRYLAICQPLRYPVLMSAKLSILLVAGAWVAGSIHGAIQAILTFRLPYCGPNQVDYFFCDIPAVLKLACADTTVNELVTFVDIGVVVASCFSLILLSYIYIIRAILRIRTADGRRRAFSTCGAHVTIVTVYYVPCAFIYLRPDSHSILDGAAALFPTAITPFLNPLIYTLRNQEVKLALRRMVGSQSTKSEV

SEQ ID NO: 1024 - protein, 316 aa, Artificial Sequence
  Synthetic
MRRTRNTSDAVVTDFLLLGLAHPPNLRAFLFLVFFLIYILTQLGNLLILLTVWADPKLHRPMYILLGVLSFLDMWLSSVIVPRLILNFTPASKAIPFGGCAAQLYFFHFLGSTQCFLYTLMAYDRYLAICQPLRYPVLMNGKLCTILVAGAWVAGSIHGSIQTTLTFRLPYCGPNQIDYFICDIPAVLRLACADTTVNELVTFVDIGVVAASCFMLILLSYANIVHAILKIRTADGRKRAFSTCGSHLTVVTVYYVPCIFIYLRAGSKSPFDGAVAVFYTVVTPLLNPLIYTLRNQEVKSALKRLTAGRRDVGGEK

SEQ ID NO: 1025 - protein, 316 aa, Artificial Sequence
  Synthetic
MRRNRNTSDTVVTDFLLLGLAHPPNLRAFLFLVFFLIYILTQLGNLLILLTVWADPKLHRPMYILLGVLSFLDMWLSSVIVPRIILNFTPASKVIAFGGCAAQLYFFHFLGSTQCFLYTLMAYDRYLAICQPLRYPVLMNGKLCTILVAGAWVAGSIHGSIQATLTFRLPYCGPKEVDYFFCDIPAVLRLACADTTVNELVTFVDIGVVAASCFMLILLSYANIVHAILKIRTADGRKRAFSTCGSHLTVVTVYYVPCIFIYLRAGSKSPFDGAVAVFYTVVTPLLNPLIYTLRNQEVKSALKRLRAGRRDVDGEK

SEQ ID NO: 1026 - protein, 308 aa, Artificial Sequence
  Synthetic
MGKTKNTSDAVVTDFILLGLSHPPNLRSLLFLVFFIIYILTQLGNLLILLTMWADPKLCRPMYILLGVLSFLDMWLSSVTVPRLILDFTPSIKAIPFGGCVAQLYFFHFLGSTQCFLYTLMAYDRYLAICQPLHYPVLMNGRLCTVLVAGAWVAGSMHGSIQATLTFRLPYCGPNQVDYFICDIRAVLRLACADTTVNELVTFVDVRVVAASCFMLILLSYANIVHAILKIRTADGRRRAFSTCGSHLIVVTVYYVPCIFIYLRAGSKDPLDGAAAVFYTVVTPLLNPLIYTLRNQEVKSALKRITAG

SEQ ID NO: 1027 - protein, 310 aa, Artificial Sequence
  Synthetic
MQSGNQTSVSHFILVGLHHPPQLGVPLFLAFLVIYLLTVSGNGLIILTVLVDIRLHRPMYWFLCHLSFLDLTISSAIVPKMLSGFLLDSRIISFGGCVIQLFSFHFLGCTECFLYTLMAYDRFLAICKPLHYATIMTRSVCNYLALGTWIGGTIHSLFQTSFIFRLPFCGPNRVDYFFCDIPAVLRLVCADTTINELVTFVDIGFLALTCFMLILTSYGYIVAAILRIRSADGRRNAFSTCAAHLTVVIVYYVPCTFIYLRPGSQEPLDGVVAVFYTVITPLLNPIIYTLRNKQMKAALRRLGGLREVHP

SEQ ID NO: 1028 - protein, 315 aa, Artificial Sequence
  Synthetic
NSKELQSGNQTSVSHFILVGLHHPPQLGAPLFLAFLVIYLLTVSGNGLIILTVLVDIRLHRPMCLFLCHLSFLDMTISCAIVPKMLAGFLLGSRIISFGGCVIQLFSFHFLGCTECFLYTLMAYDRFLAICKPLHYATIMTHRVCNSLALGTWLGGTIHSLFQTSFVFRLPFCGPNRVDYIFCDIPAMLRLACADTAINELVTFADIGFLALTCFMLILTSYGYIVAAILRIPSADGRRNAFSTCAAHLTVVIVYYVPCTFIYLRPCSQEPLDGVVAVFYTVITPLLNSIIYTLCNKEMKAALQRLGGHKEVQPH

SEQ ID NO: 1029 - protein, 317 aa, Artificial Sequence
  Synthetic
MTTENPNQTVVSHFFLEGLRYTAKHSSLFFLLFLLIYSITVAGNLLILLTVGSDSHLSLPMYHFLGHLSFLDACLSTVTVPKVMAGLLTDGKVISFEGCAVQLYCFHFLASTECFLYTVMAYDRYLAICQPLHYPVAMNRRMCAEMAGITWAIGATHAAIHTSLTFRLLYCGPCHIAYFFCDIPPVLKLACTDTTINELVMLASIGIVAAGCLILIVISYIFIVAAVLRIRTAQGRQRAFSPCTAQLTGVLLYYVPPVCIYLQPRSSEAGAGAPAVFYTIVTPMLNPFIYTLRNKEVKHALQRLLCSRESTAGSPPP

SEQ ID NO: 1030 - protein, 320 aa, Artificial Sequence
  Synthetic
MVERMQYLNQSVVSQFFLEGLMYTAEHPGLFFLLFLLIYSITVSGNLLILLTVGSDPHLRSPMYHFLGHLSFLDACLSTVTVPKVMAGLLTDGKVISFQGCALQLYCFHFLASTECFLYTVMAYDRYLAICQPLHYPVVMNKRVCAGLAGSTWAIGAMHSAIHTSLTFRLLYCGPQHIAYFFCDIPPVLKLACADTTINELVMLANIGVVAAGCLILIIISYAFIVAAVLRIRTAEGRQRAFSTCTAHLTVVLLYYMPPVCIYLQPSSTGAGAGAPAVFYTIVTPMLNPFIYTLRNKEVKRALRRLVCSSQESPASSPAP

SEQ ID NO: 1031 - protein, 305 aa, Artificial Sequence
  Synthetic
MENHTLLDEFILLGIPQTQGLETLLFVVFLFIYIFTLLGNLLIFTAIVSSSTLHTPMYFFLGLLSIFDMLFPSVTCPKMLLYLSGKSPAISYRGCIAQLFFYHFLGSTEGCLYSVMAYDRYVAICHPLRYMLIMKPGVCLGLVIVSWLIGCLQSGILTFFTFQLTYCGPNHVHHFFCDIPAVLPLACTDNKLARKVGSINVGFLALMLLFSVCVSYVHIGVAILRIRSAEGRQKAFFTCSAHLTAILCAYGPVIIIYLQRTPNPLLGAVVQILNNIVSPMLNSLIYSLRNKEVKRALRRVFHSLA

SEQ ID NO: 1032 - protein, 310 aa, Artificial Sequence
  Synthetic
MDNYTLLNEFRGSGIPQTQGLETLLFVVFLFIYFFTLLGNSLIFTAIISSSTLHTPMYFFLGLLSVFDMLFPSVTCPKMLFYLSVRSPAISYKGCAAQLFFYHLLGSTEGCLYSVMAYDRYVAICHPLRYMLIMKPGVCVSLVIIAWLVGCLHATILTSLTFQLVYCASNQVDYFFCDLPAVLPLACTDSKLARKVGSINVGFLALMLLFSVCVSYVHIGVAILRIRSAEGRQKAFSTCSAHLTAILCAYGPVIIIYLQRTPNPLLGAVVQILNNIVSPMLNSLIYSLRNKEVKRSLRRVFQNITFHGQK

SEQ ID NO: 1033 - protein, 314 aa, Artificial Sequence
  Synthetic
MTNHTMVTEFTLLGIPETEGLENALLFLFSTMYACALLGNFLILTAITTSPRLHTPMYFFLGNLSIFDLGFCSTTAPKMLSYLSGWGGGISFQGCVVQHFFYHCLGCTLCFLYTVMAYDRFVAICFPLRYTIIMNHRVCCVLATGTWMSGCVHATILTSLTFQLPYCGPSEVSYYFCDMPAVLLLACEDSSLAQRVGFTNVGLLSLICFFLIIVSYTRIGISISKIRSTEGRQRAFSTCSAHLTAIMCVYGPVIVIYLQPNPSPLLSAIIQILHNLVTPTINPLIYSLRNKDVKAALRHVFLKRCLSLEVNENS

SEQ ID NO: 1034 - protein, 316 aa, Artificial Sequence
  Synthetic
MNMTNNTMVTEFTLLGIPETEGLENVLLFLFSTLYACALLGNLLLLTAVTSSPRLHTPMYFFLSNLSISDMGFCSTTAPKMLSYLSGRGGGISFQGCVVQHFFYHCIGCVLCFLYTVMAYDRFVAICFPLRYTIIMNHRVCCVLATGTWMSGCVHATILTCLTFQLPYCGPSEVSYYFCDMPAVLLLACEDSSLAQRVGFTNVGLLSLICFFLIVVSYTRIGISISKIRSTEGRQRAFSTCSAHLTAIMCVYGPVIVIYLQPNPSPLLSAIIQIFNNLVTPTINPLIYSLRNKDVKAALRHVFLKRCLSLEVNENI

SEQ ID NO: 1035 - protein, 311 aa, Artificial Sequence
  Synthetic
MTNHTMVTEFTLLGIPETEGLENVLLFLFSTLYACALLGNLLLLTAVISSPQLHTPMYFFLGNLSIFDMGFCSTTAPKMLSYLSGQGGGISFQGCVVQHFFYHCLGCTECFLYTVMAYDRFVAICFPLRYTIIMNHRVCCVLATGTWMSGCVHATILTCLTFQLPYCGPSNVGYYFCDMPAVLPLACEDHSLAQRVGFTNVGLLSLICFFLILVSYTRIGISISKIRSTEGRQRAFSTCSAHLTAIICAYGPVIVIYLQPNPSPLLGAVIQILNNLVTPTINPLIYSLRNKDVKAALRHVFLKRSLSLESK

SEQ ID NO: 1036 - protein, 298 aa, Artificial Sequence
  Synthetic
MRNHTMVTEFILLGIPETEGLETALLFLFSSFYLCTLLGNVLILTAIISSTRLHTPMYFFLGNLSIFDLGFSSTTVPKMLFYLSGNSHAISYAGCVSQLFFYHFLGCTECFLYTVMACDRFVAICFPLRYTVIMNHRVCFMLATGTWMIGCVHAMILTPLTFQLPYCGPNKVGYYFCDIPAVLPLACKDTSLAQRVGFTNVGLLSLICFFLILVSYTCIGISISKIRSAEGRQRAFSTCSAHLTAILCAYGPVIVIYLQPNPSALLGSIIQILNNLVTPMLNPLIYSLRNKDVKSDQP

SEQ ID NO: 1037 - protein, 310 aa, Artificial Sequence
  Synthetic
MEIKNCSVVTEFILLGIPHTEGFETLLFVLFLPFYACTLVGNVSILVAVISSTRLHTPMYFFLGNLSVFDMGFSSVTCPKMLFYLMGLSRLISYQDCVSQLFFFHFLGSIECFLYTVMAYDRFAAICHPLRYSVIMNSKICVALAVGTWLLGCFHSSVLTSLTFTLPYCGPNEVDHFFCDIPAILPLASADTSLAQRVSFTNVGLVSLVCFLLILLSYTRITISILSIQSTEGRQRAFSTCSAHLIAILCAYGPIITIYLQPTPNPMLGTVVQILMNLVGPMLNPLIYTLRNKEVKIALKKILHGSVSEG

SEQ ID NO: 1038 - protein, 311 aa, Artificial Sequence
  Synthetic
MEVKNCCMVTEFILLGIPHTEGLEMTLFVLFLPFYACTLLGNVSILVAVMSSARLHTPMYFFLGNLSVFDMGFSSVTCPKMLLYLMGLSRLISYKDCVCQLFFFHFLGSIECFLFTVMAYDRFTAICYPLRYTVIMNPRICVALAVGTWLLGCIHSSILTSLTFTLPYCGPNEVDHFFCDIPALLPLACADTSLAQKVSFTNVGLISLVCFLLILLSYTRITISILSIRTTEGRRRAFSTCSAHLIAILCAGPIITVYLQPTPNPMLGTMVQILMNLVGPMLNPLIYTLRNKEVKTALKTILHRTGHVPES

SEQ ID NO: 1039 - protein, 312 aa, Artificial Sequence
  Synthetic
MEVKNCCMVTEFILLGIPHTEGLEMTLFVLFLPFYACTLLGNVSILVAVMSSARLHTPMYFFLGNLSVFDMGFSSVTCPKMLLYLMGLSRLISYKDCVCQLFFFHFLGSIECFLFTVMAYDRFTAICYPLRYTVIMNPRICVALAVGTWLLGCIHSSILTSLTFTLPYCGPNEVDHFFCDIPALLPLACADTSLAQRVSFTNVGLISLVCFLLILLSYTRITISILSIRTTEGRRRAFSTCSAHLIAILCAYGPIITVYLQPTPNPMLGTVVQILMNLVGPMLNPLIYTLRNKEVKTALKTILHRTGHVPES

SEQ ID NO: 1040 - protein, 311 aa, Artificial Sequence
  Synthetic
MRNRSVVTQFILLGIPNTEGLETMLFVLFLSFYIFTLMGNLLILLAIISSSRLHTPMYFFLCKLSIFDIFFPSVSSPKMLFYLSGNSRAISYAGCVSQLFFYHFLGCTECFLYTVMAYDRFVAICYPLRYSIIMSHRVCAILATGTSFFGCIQATFLTTLTFQLPYCGPNEVDYYFCDIPVMLKLACADTSALEMVGFISVGLMPLSCFLLILTSYSCIVCSILQIRSAEGRRRAFSTCSAHLTAILLFYMPVVLIYLRPTPSPWLDATVQVLNNLVTPMLNPLIYSLRNKEVKASLWKVLRKPAFAPEQL

SEQ ID NO: 1041 - protein, 310 aa, Artificial Sequence
  Synthetic
MRNFSVVTQFILLGIPHTEGVEIMLFVLFLSFYIFTLVGNLLILFAIVSSSRLHTPMYFFLCQLSVCDIFFPSVSSPKMLFYLSGNSRAISYTGCVCQLFFYHFLGCTECFLYTVMAYDRFIAICFPLRYSIIMNHKVCAIMAVGTSFFGCIQATFLTTLTFQLPYCGPNEVDYYFCDIPVMLKLACADTSTLEMVGLISVGLMPLSCFLLILTSYSFILCSILQIRSTEGRHRAFSTCSAHLTAILLAFMPVVLIYLQPTPNPWLNAAVQVLNNLVTPMLNPLIYSLRNKEVKCSLKKMLQQGPILSKK

SEQ ID NO: 1042 - protein, 311 aa, Artificial Sequence
  Synthetic
MKNLSVVTQFILLGIPHTEGVETMLFVLFFSFYIFTLVGNLLILLAIVSSSRLHTPMYFFLCQLSVCDIFFPSVSSPKMLFYLSGNTPAISYAGCVSQLFFYHFLGGTECFLYTVMAYDRFVAICYPLRYSVIMSHRICAFLAMGTAVFGCIHSTFLTTLTFQLPYCGPKDVNYYFCDIPVVMKLACADTSTLEMVGFISVGLMPLSCFFFILTSYSCIVRSILQIRSTEGRHRAFSTCSAHFTAILLFYMPVIFIYLRPTPSPWLDATVQILNNLVTPMLNPLIYSLRNKEVKSSLWTVLHLLCFLPKHL

SEQ ID NO: 1043 - protein, 308 aa, Artificial Sequence
  Synthetic
MRNCTLVTEFILVGIPYTAGLERMLFVLFLSFYLLTLPGNLLILMAILTSASLHTPMYFFLGNLSVLDIFFPSVSSPKMMLSLTGHSHTISYQGCASQLFFYHFLGCAECFLYTVMAYDRFAAICHPLRYTVIMSSWVCGSMAVATWMGSCLHASVLTFLIFKLPYCGPNEVDNFFCDIPVVLPLACADTSLAQAVSFINVGLVALVCFLLILISYSRIVISILKIRSSEGRRRAFSTCSAHLTSILLFYGPVVLIYLRPASSPWLDSVVQVLNNIVTPSLNPLIYSLRNKEVKVALRKALTQRVPGE

SEQ ID NO: 1044 - protein, 318 aa, Artificial Sequence
  Synthetic
AACAMSMRNHTSVTEFILLGISNTEGLESMLFALFLVFYVFALLGNLLIFLTILASPNLHTPMYFFLGNLAVFDIFFPSVNSPKMMDYLVRQGRTISYQGCASQIFFYHTLGCTECFLYTVMAYDRFVAICYPMRYTVIMNPRVCTCFTVGTWLGGFVHGSILTFLIFKLPYCGPNEVDSFFCDIPVVLSLACADTSLAQTVSFTNVGVVALTCFLLVLTSYTRIVISILKIRSSEGRRRAFSTCSAHFTSILLFYGPVILVYLRPASSPWLDSVVQVFNNVVTPSLNPLIYSLRNKEVKLALRKMLSQAMQPLGYKE

SEQ ID NO: 1045 - protein, 312 aa, Artificial Sequence
  Synthetic
KMNYQEIGNYTKVTEFILVGLSRHPTSQSVVFWTLMFLYIVTLAGNSLIIFLVGGNSQLHTPMYFFLGNLSLLDLLFSTSVVPLIMVNSLYNSTISYSSCFTQLAFRAFLALAECFLLAIMAYDRFVAISNPLRYNLVMSSRVCIFMALLAWMAALLLTVLPILIFPISFCGQNVVNHFSCEVQAIFKLLCSNTISLQIMMIACAVISMPVPLMFILFSYLCILKAVLRIHPTKARLKAFSTCASHLIVVTIYFGTLIYIYMRPQSKISHNGDKIVSIFYAAVTPMLNPLIYTLRNKDVKAVLRRVNCGVKS

SEQ ID NO: 1046 - protein, 312 aa, Artificial Sequence; identical to SEQ ID NO: 1045
  Synthetic

SEQ ID NO: 1047 - protein, 319 aa, Artificial Sequence
  Synthetic
MDVKNQTAVTEFIFLGFPGSSSLQLPLFMMFLTVYLLSLMGNTLIIFLILVDSTLQTPMYIFLGNLSFLEIWYTTATVPKLLATCVTKVVTIPVAGCITQYYFFFSLGATECILLAVMAYDRHVAVCRPLHYSLLMSVHICLRFSAASWVGGFLAPLLPTILISQLNFCGPQKINHFFCDSDPIFKLSCSDTFLVEALGYTCSSVVILSSFLLTMSSYGNIVVTIIRLSSREARKKTFSTCASHLTVVTIYYGTIIFAYVRPPAKYNFTIGKVVSVFYCVITPLVNPLIYTLRNKDVMKAFQKFLSQKKFLMGKNMHGL

SEQ ID NO: 1048 - protein, 312 aa, Artificial Sequence
  Synthetic
MSNCSNNALVTEFILLGFPELCHLQGLLFGFFLIIYVVTVLENLVIVGTISASRQLHTPMYFFLANLSVLETLYTTVTVPKLLADLLAGAKTISFSGCLTQLFLFLSLGSSECFLLSTMACDRYLAICRPLHYPAIMDSKLCLHLALSAWLGGFLASFVSTALISRLRFCGPNALNHFFCDISPLLQLSCTDTTAIEMLDFVAALAVLATSLIVTSVSYVHIIATVLRIPGGAGRRKAFSTCASHLVVVLIFYTTTTFMYARPHAISSFDLNKLVSVIYSVVTPLLNPIIYCLRNRDIREAFTKFLQPLRFP

SEQ ID NO: 1049 - protein, 308 aa, Artificial Sequence
  Synthetic
MDTGNKTLPQDFLLLGFPGSQTLQLSLFMLFLVMYILTVSGNVAILMLVSTSHQLHTPMYFFLSNLSFLEIWYTTAAVPKALAILLGRSQTISFTSCLLQMYFVFSLGCTEYFLLAAMAYDRCLAICYPLHYGAIMSSLLSAQLALGSWVCGFVAIAVPTALISGLSFCGPRAINHFFCDIAPWIALACTNTQAVELVAFVIAVVVILSSCLITFVSYVYIISTILRIPSASGRSKAFSTCSSHLTVVLIWYGSTVFLHVRTSIKDALDLIKAVHVLNTVVTPVLNPFIYTLRNKEVRETLLKKWKGK

SEQ ID NO: 1050 - protein, 307 aa, Artificial Sequence
  Synthetic
MDTGNKTLPQDFLLLGFPGSQTLQLSLFMLFLVMYILTVSGNVAILMLVSTSHQLHTPMYFFLSNLSFLEIWYTTAAVPKALAILLGRSQTISFTSCLLQMYFVFSLGCTEYFLLAAMAYDRCLAICYPLHYGAIMSSLLSAQLALGSWVCGFVAIAVPTALISGLSFCGPRAINHFFCDIAPWIALACTNTQAVELVAFVIAVVVILSSCLITFVSYVYIISTILRIPSASGRSKAFSTCSSHLTVVLIWYGSTVFLHVRTSIKDALDLIKAVHVLNTVVTPVLNPFIYTLRNKEVRETLLKKWKG

SEQ ID NO: 1051 - protein, 307 aa, Artificial Sequence
  Synthetic
MITENWTLAQDFLLLGFPGSQVLQFSLFLFFLVMYLLTIGGNMAILLLVSTSHQLQTPMYFFLSNLSFLEIWYTTAAVPKALAILVGKSQSISFLGCLFQMYLVFSLGCTEYFLLAAMAYDRYLAICFPLHYQTIMNSLLSAQLALSSWICGFLAISVPAALISTLSFCGTHAINHFFCDIAPWIALACTSTQGVETVAFVIAFVVILSSCLITLISYAYIIRTILRIPSTSGRRKAFSTCSSHLTVVLIWYGSTIFLHVRTSIKDDLQLTKAVHVLNTVVTPALNPFIYTLRNKEVREILGKKWKR

SEQ ID NO: 1052 - protein, 308 aa, Artificial Sequence
  Synthetic
MITENWTLAQDFLLLGFPGSQVLQFSLFLFFLVMYLLTIGGNMAILLLVSTSHQLQTPMYFFLSNLSFLEIWYTTAAVPKALAILVGKSQSISFLGCLFQMYLVFSLGCTEYFLLAAMAYDRYLAICFPLHYQTIMNSLLSAQLALSSWICGFLAISVPAALISTLSFCGTHAINHFFCDIAPWIALACTSTQGVETVAFVIAFVVILSSCLITLISYAYIIRTILRIPSTSGRRKAFSTCSSHLTVVLIWYGSTIFLHVRTSIKDDLQLTKAVHVLNTVVTPALNPFIYTLRNKEVREILGKKWKRK

SEQ ID NO: 1053 - protein, 312 aa, Artificial Sequence
  Synthetic
LMAWSTGQNLSTPGPFILLGFPGPRSMRIGLFLLFLVMYLLTVAGNLAIISLVGAHRCLQTPMYFFLCNLSFLEIWFTTACVPKTLATFAPRGGAISLAGCATQMYFVFSLGCTEYFLLAVMAYDRYLAICLPLRYGGIMTPGLATRLALGSWLCGFSAIIVPAALIARLSFCGSRVINHFFCDISPWIVLSCTDTQVVELVSFGIAFCVILGSCGITLVSYAYIITTIIKIPSAQGRHRAFSTCSSHLTVVLIWYGSTIFLHVRTSVESSLDLTKAVTVLNTIVTPVLNPFIYTLRNKDVKEALRRTMKGK

SEQ ID NO: 1054 - protein, 319 aa, Artificial Sequence
  Synthetic
MEPQNTSTVTNFQLLGFQNLLEWQALLFVIFLLIYCLTIIGNVVIITVVSQGLRLHSPMYMFLQHLSFLEVWYTSTTVPLLLANLLSWGQAISFSACMAQLYFFVFLGATECFLLAFMAYDRYLAICSPLRYPFLMHRGLCARLVVVSWCTGVSTGFLPSLMISRLDFCGRNQINHFFCDLPPLMQLSCSRVYITEVTIFILSIAVLCICFFLTLGPYVFIVSSILRIPSTSGRRKTFSTCGSHLAVVTLYYGTMISMYVCPSPHLLPEINKIISVFYTVVTPLLNPVIYSLRNKDFKEAVRKVMRRKCGILWSTSKRK

SEQ ID NO: 1055 - protein, 319 aa, Artificial Sequence
  Synthetic
MEPQNTSTVTNFQLLGFQNLLEWQALLFVIFLLIYCLTIIGNVVIITVVSQGLRLHSPMYMFLQHLSFLEVWYTSTTVPLLLANLLSWGQAISFSACMAQLYFFVFLSATECFLLALMAYDRYLAICSPLRYPFLMHRGLCTRLVVVSWCTGVSTGFLPSLMISRLDFCGPNQINHFFCDLPPLMQLSCSRVYITEVTIFILSIAVLCICFFLTLGPYVFIVSSILRIPSTSGRRKTFSTCGSHLAVVTLYYGTMISMYVCPSPHLLPEINKIISVFYTVVTPLLNPVIYSLRNKDFKEAVRKVMRRGILWSTSKRKFL

SEQ ID NO: 1056 - protein, 319 aa, Artificial Sequence
  Synthetic
MEPQNLSKVTEFQLLGFQNLLEWQSLLFAIFLCFYLLTITGNMVIIGVVSEDPRLRAPMYTFLQHLSFLEIWYTSTTVPLLLSNLASWGHMLSFSACMAQLYFFVFFGATECFLLAAMAYDRYLAICHPLHYSLLMSPDNCAALVTVSWVTGVGTGFLPSLLISKLDFCGPNRINHFFCDLPPLIQLSCSSVYVTEMAIFVLSIAVLCICFLLTLVSYVFIVSSILRIPSTSGRMKTFSTCGSHLAVVTIYYGTMISMYVRPNAHLSPELNKVISVFYTVVTPLLNPVIYSLRNKDFKEAVRKIVRTGVYRARVKGSAL

SEQ ID NO: 1057 - protein, 319 aa, Artificial Sequence
  Synthetic
MEPQNLSKVTEFQLLGFQNLLEWQSLLFAIFLCFYLLTITGNMVIICVVSEDPRLRAPMYTFLQHLSFLEIWYTSTTVPLLLSKLASWGHMLSFPACMAQLYFFVFFGATECFLLAAMAYDRYLAICHPLHYSLLMSPDNCAALVTVSWVTGVGTGFLPSLLISKLDFCGPNRINHFFCDLPPLIQLSCSSVYVTEMAIFVLSIAVLCICFLLTLVSYVFIVSSILRIPSTSGRMKTFSTCGSHLAVVTIYYGTMISMYVRPNAHLSPELNKVISVFYTVVTPLLNPVIYSLRNKDFKEAVRKIVRTGVYRARVKGSAL

SEQ ID NO: 1058 - protein, 315 aa, Artificial Sequence
  Synthetic
MQPYTKNWTQVTEFVMMGFAGIHEAHLLFFILFLTMYLFTLVENLAIILVVGLDHRLRRPMYFFLTHLSCLEIWYTSVTVPKMLAGFIGGGKNISYADCLSQLFIFTFLGATECFLLAAMAYDRYVAICMPLHYGAFVSWGTCIRLAAACWLVGFLTPILPIYLLSQLTFYGPNVIDHFSCDASPLLALSCSDVTWKETVDFLVSLAVLLASSMVIAVSYGNIVWTLLHIRSAAERWKAFSTCAAHLTVVSLFYGTLFFMYVQTKVTSSINFNKVVSVFYSVVTPMLNPLIYSLRNKEVKGALGRVFSLNFWKGQ

SEQ ID NO: 1059 - protein, 315 aa, Artificial Sequence; identical to SEQ ID NO: 1058
  Synthetic

SEQ ID NO: 1060 - protein, 311 aa, Artificial Sequence
  Synthetic
MELENQTRVTKFILVGFPGSLSMRAAMFLIFLVAYILTVAENVIIILLVLQNRPLHKPMYFFLANLSFLETWYISVTVPKLLFSFWSVNNSISFTLCMIQLYFFIALMCTECVLLAAMAYDRYVAICRPLHYPTIMSHGLCFRLALGSWAIGFGISLAKIYFISCLSFCGPNVINHFFCDISPVLNLSCTDMSITELVDFILALVIFLFPLFITVLSYGCILATILCMPTGKQKAFSTCASHLVVVTIFYSAIIFMYARPRVIHAFNMNKIISIFYAIVTPSLNPFIYCLRNREVKEALKKLAYCQASRSD

SEQ ID NO: 1061 - protein, 308 aa, Artificial Sequence
  Synthetic
MELENQTRVTKFILVGFPGSLSMRAAMFLIFLVAYILTVAENVIIILLVLQNRPLHKPMYFFLANLSFLETWYISVTVPKLLFSFWSVNNSISFTLCMIQLYFFIALMCTECVLLAAMAYDRYVAICRPLHYPTIMSHGLCFCLALGSWAIGFGISLAKIYFISCLSFCGPNVINHFFCDISPVLNLSCTDMSITELVDFILALVIFLFPLFITVLSYGCILATILCMPTGKQKAFSTCASHLVVVTIFYSAIIFMYARPRVIHAFNMNKIISIFYAIVTPSLNPFIYCLRNREVKEALKKLAYCQAS

SEQ ID NO: 1062 - protein, 311 aa, Artificial Sequence
  Synthetic
MDVDNQTRVTKFILVGFPGSLSMRAAVFLMFLVAYILTVAENVIIILLVQQNRPLHKPMYFFLANLSFLETWYISVTVPKLLFSFWSMSNSISFTHCMIQLYFFIALMCTECVLLAAMAYDRYVAICRPLHYPTIMSHGLCFRLALGSWVIGFGISLAKIYFISRLSFCGPNVINHFFCDISPVLNLSCTDMSIAELVDFVLALVIFLFPLSITVLSYGCILATVLRMPTGKQKAFSTCASHLVVVTIFYSATIFMYARPRAIHAFNMNKVISIFYAIVTPALNPFIYCLRNREVKEALKKLIYCQVIRSD

SEQ ID NO: 1063 - protein, 311 aa, Artificial Sequence; identical to SEQ ID NO: 1062
  Synthetic

SEQ ID NO: 1064 - protein, 317 aa, Artificial Sequence
  Synthetic
MFARRNSSDVTEFILVGFSGSLGLHLSLLGLFLLAYMLTVTENLVIITVIRASPSLHKPMYLFLSNLSFLEIWYISVTVPKMLLSLVSPFQHISFTGCMAQLYFFLALACTECALLGVMAYDRYVAVCNPLRYPVIMSPGLCSLLAGGSWLSGFTISLGKVFFISRLGYCGPNVMNHFFCDVSPLLNLACSDMSVAELVDFLLALLILLGPLLLTVFSYTAILSTVLRMPSAGGRQKAFSTCASHLAVVVIFYSASLFIYARPRALYSFDYNKLVSVVYTVLTPLINPIIYCLRNQEVKQALHKVQQRAAQVLGASS

SEQ ID NO: 1065 - protein, 320 aa, Artificial Sequence
  Synthetic
MERRNHTGRVSEFVLLGFPAPAPLRALLFFLSLLAYVLVLTENILIITAIRNHPTLHKPMYFFLANMSFLEIWYVTVTIPKMLAGFIGENQLISFEACMTQLYFFLGLGCTECVLLAVMAYDRYVAICHPLHYPVIVSSRLCVQMAAGSWAGGFGISMVKVFLISRLSYCGPNTINHFFCDVSPLLNLSCTDMSTAELTDFILAIFILLGPLSVTGASYMAITGAVMRIPSAAGRHKAFSTCASHLTVVIIFYAASIFIYARPKALSAFDTNKLVSVLYAVIVPLLNPIIYCLRNQEVKKALRRTLHLGQDANTKKSSRD

SEQ ID NO: 1066 - protein, 319 aa, Artificial Sequence
  Synthetic
MEWRNHSGRVSEFVLLGFPAPAPLQVLLFALLLLAYVLVLTENTLIIMAIRNHSTLHKPMYFFLANMSFLEIWYVTVTIPKMLAGFVGQDQLISFEGCMTQLYFFLGLGCTECVLLAVMAYDRYMAICYPLHYPVIVSGRLCVQMAAGSWAGGFGISMVKVFLISGLSYCGPNIINHFFCDVSPLLNLSCTDMSTAELTDFILAIFILLGPLSVTGASYVAITGAVMHIPSAAGRYKAFSTCASHLTVVIIFYAASIFIYARPKALSAFDTNKLVSVLYAVIVPLLNPIIYCLRNQEVKRALCCTLHQDPDPKKASRNV

SEQ ID NO: 1067 - protein, 312 aa, Artificial Sequence
  Synthetic
MRGENITKVSTFILLGFPTAPELQYLLFLLFLLAYLFVLVENLAIILTVWSSASLHRPMYYFLGIMSTLEIWYVCDIIPKMLDGFLLQRKRISFIGCMTQLYFFSSLVCTECVLLASMAYDRYVAICHPLRYQVIMTTGLCVQLVAFSFASGFSISVIKVYFISSATFCGSNVLNHFFCDISPILKLACTDFSTAELVDFILAFIILVFPLLATVLSYGHITLAVLRIPSATGRWRAFSTCASHLTVVTIFYTALLFMYVRPQAIDTRSSNKLISVLYTVLTPILNPLIYCLRNKEFKDALRKALGLGQAPL

SEQ ID NO: 1068 - protein, 312 aa, Artificial Sequence
  Synthetic
MSGENVTKVSTFILVGLPTAPGLQYLLFLLFLLTYLFVLVENLAIILIVWSSTSLHRPMYYFLSSMSFLEIWYVSDITPKMLEGFLLQQKRISFVGCMTQLYFFSSLVCTECVLLASMAYDRYVAICHPLRYHVLVTPGLCLQLVGFSFVSGFTISMIKVCFISSVTFCGSNVLNHFFCDISPILKLACTDFSTAELVDFILAFIILVFPLLATILSYWHITLAVLRIPSATGCWRAFSTCASHLTVVTVFYTALLFMYVRPQAIDSQSSNKLISAVYTVVTPIINPLIYCLRNKEFKDALKKALGLGQTSH

SEQ ID NO: 1069 - protein, 319 aa, Artificial Sequence
  Synthetic
MSGENVTRVGTFILVGFPTAPGLQYLLFLLFLLTYLFVLVENLAIILTVWSSTSLHRPMYYFLSSMSFLEIWYVSDITPKMLEGFLLQQKRISFVGCMTQLYFFSSLVCTECVLLASMAYDRYVAICHPLRYHVLVTPGLCLQLVGFSFVSGFTISMIKVCFISSVTFCGSNVLNHFFCDISPILKLACTDFSTAELVDFILAFIILVFPLLATMLSYAHITLAVLRIPSATGCWRAFFTCASHLTVVTVFYTALLFMYVRPQAIDSRSSNKLISVLYTVITPILNPLIYCLRNKEFKNALKKAFGLGRLSSLLELHLQ

SEQ ID NO: 1070 - protein, 310 aa, Artificial Sequence
  Synthetic
MLDMNITLVSEFILVGFPTAPWLQILLFFIFLVVYMLIIAENLVIIFTVWSTGSLHKPMYYFLSSMSFLEIWYVSVTVPKMLDGFLLQRRHISFTGCMTQLYFFISLACTECVLLAAMAYDRYVAICHPLRYPVIMTTVYCMQLMALSYFSGFMVSVVKVYFISHVAFCGSNVMNHFFCDISPILKLACKDMSTAELVDFALAIVILVFPLITTVLSYVYIVSTILRIPSTQGRKKAFSTCASHLTVVIIYYTAMIFMYVRPRAIASFNSNKLISAVYAVLTPMLNPFIYCLRNREVKDAIKKTLGGLLC

SEQ ID NO: 1071 - protein, 314 aa, Artificial Sequence
  Synthetic
MENITNISEFILMGFPTAPWLQILLFSIFFITYVFVLLENLVIILTVWVTGSLHKPMYYFLSTMSFLEAWYISVTVPKMLAGFLFHPNTISFLGCMTQLYFFMSLACTECVLLAAMAYDRYVAICWPLRYPVMMTTGFCVQLTISSWVSGFTISMAKVYFLSRVAFCGNNVLNHFFCDVSPILKLACMNLSMAETVDFALAIVILIFPLSATVLSYGFIVSTVLQIPSATGQRKAFSTCASHLTVVVIFYTAVIFMYVRPRAIASFNSNKLISAIYAVFTPMLNPIIYCLRNKEVKDAIRKTIGRAPALGESIS

SEQ ID NO: 1072 - protein, 317 aa, Artificial Sequence
  Synthetic
MRNLSGGHVEEFVLVGFPTTPPLQLLLFVLFFAIYLLTLLENALIVFTIWLAPSLHRPMYFFLGHLSFLELWYINVTIPRLLAAFLTQDGRVSYVGCMTQLYFFIALACTECVLLAVMAYDRYLAICGPLLYPSLMPSSLATRLAAASWGSGFFSSMMKLLFISQLSYCGPNIINHFFCDISPLLNLTCSDKEQAELVDFLLALVMILLPLLAVVSSYTAIIAAILRIPTSRGRHKAFSTCAAHLAVVVIYYSSTLFTYARPRAMYTFNHNKIISVLYTIIVPFFNPAIYCLRNKEVKEAFRKTVMGRCHYPRDVQD

SEQ ID NO: 1073 - protein, 317 aa, Artificial Sequence; identical to SEQ ID NO: 1072
  Synthetic

SEQ ID NO: 1074 - protein, 316 aa, Artificial Sequence
  Synthetic
MRNLSGSHVEEFVLVGFPTSRPFQALLFVFFFAIYLLTLLENVLIVSTIWLTPSLHRPMYFFLGHLSFLELWYINVTIPRLLGAFLTQDGRVSYGGCMTQLYFFIALACTECVLLAVMAYDRYLAICEPLRYPSLMPPRLATRLAAASWGSGFFSSMMKLLFISRLSYCGPNIINHFFCDISPLLNLTCSDKEQAELVDFLLALVMILLPLVAVVSSYAAIIVAILRIPTAQGRHKAFSTCTSHLAVVVIYYSSTLFTYARPRAMYTFNYNKIISVLYTVIVPFLNPAIYCLRNKEVKDAFKTVLGRCHHPREGPD

SEQ ID NO: 1075 - protein, 322 aa, Artificial Sequence
  Synthetic
TTIILEVDNHTVTTRFILLGFPTRPAFQLLFFSIFLATYLLTLLENLLIILAIHSDGQLHKPMYFFLSHLSFLEMWYVTVISPKMLVDFLSHDKSISFNGCMTQLYFFVTFVCTEYILLAIMAFDRYVAICNPLRYPVIMTNQLCGTLAGGCWFCGLMTAMIKMVFIAQLHYCGMPQINHYFCDISPLLNVSCEDASQAEMVDFFLALMVIAIPLCVVVASYAAILATILRIPSAQGRQKAFSTCASHLTVVILFYSMTLFTYARPKLMYAYNSNKVVSVLYTVIVPLLNPIIYCLRNHEVKAALRKTIHCRGSGPQGNGAF

SEQ ID NO: 1076 - protein, 322 aa, Artificial Sequence
  Synthetic
TTIILEVDNHTVTTRFILLGFPTRPAFQLLFFSIFLATYLLTLLENLLIILAIHSDGQLHKPMYFFLSHLSFLEMWYVTVISPKMLVDFLSHDKSISFNGCMTQLYFFVTFVCTEYILLAIMAFDRYVAICNPLRYPVIMTNQLCGTLAGGCWFCGLMTAMIKMVFIAQLHYCGMPQINHYFCDISPLLNVSCEDASQAEMVDFFLALMVIAIPLCVVVASYAAILATILRIPSAQGRQKAFSTCASHLTIVILFYSMTLFTYARPKLMYAYNSNKVVSVLYTVIVPLLNPIIYCLRNHEVKAALRKTIHCRGSGPQGNGAF

SEQ ID NO: 1077 - protein, 323 aa, Artificial Sequence
  Synthetic
VIKGLQVDNWTETTHFVLLGFPSRPAFQFLLFSVFLVTYLLTLAENLLIILAIRSDGQLHKPMYFFLSHLSFLEMWYVTVISPKMLVDFLSKDKSISFNGCMTQLYFFVTFVCTEYILLAVMAFDRYVAICNPLRYPVIMTNQLCGVMAGGCWFCGLMTAMIKMVFIARLRYCGTPHINHYFCDISPLLNVSCEDSSQAELVDFFLALMVIAVPLCVVVTSYAIILVTILKIPSAQGRQKAFSTCASHLTVVTLFYSTTLFTYARPKLMYAYNSNKVVSVLYTVVVPLLNPIIYCLRNRDVKMALKKTILCRSGSGGDGDFSS

SEQ ID NO: 1078 - protein, 314 aa, Artificial Sequence
  Synthetic
MEKSLELGNVTRVQEFVLLGLSTRLGIRDALFVIFLTLYLLTLLENTLIIYLICSHSELHKPMYFFLGNLSCLEMCYVSVTMPTLLMGLWTGPCHVPFTGCMTQLFFFISLICTECTLLASMAYDRYVAICRPLHYPLLMRPQVCLGLALSSWLGGLLVSVIKTACIASLSYCGPNVLNHFFCDVSPLLNLSCTHVALTELVDFISAIVILWGSLLVAMASYVAIGRTVLGMPSAAARHKAFSTCASHLVVVGIFYSATIFIYARPSRIEAMDLNKVLSVIYTVVTPMCNPVIYCLRNREVQSAFHRTMRWSSV

SEQ ID NO: 1079 - protein, 312 aa, Artificial Sequence
  Synthetic
MERSLALANMTRVQQFILLGLSTRLDIRDALFAVFLTLYLLTLLENTLIIYLICSHKELHKPMYFFLGNLSCLEMCYVSVTMPTLLMGLWNGLYHIPFIACMTQLFFFIVLVGTECILLASMAYDRYVAICRPLHYPVLMRPQVCLGLAMISWLGGLLVSMIKTTCIATLSYCGPNVLNHFFCDVSPLLNLSCTHVALTELVDFISAIVILWGCFLTTMASYVAIGRAVLRMPSTTARYKAFSTCASHLVVVGIFYSVTIFIYARPKRIEAMDLNKVLSVIYTVVTPMCNPVIYCLRNKEVQVALHRTMHWS

SEQ ID NO: 1080 - protein, 312 aa, Artificial Sequence
  Synthetic
MARSLELANMTRVQKFLLLGLSTRLDIRDALFAVFLTLYLLTLVENTLIIYLIFSHKELHKPMYFFLGNLSCLEMCYVSVTMPTLLVGLWTGPYHIPFTLCMTQLFFFIVLICTECTLLASMAYDRYVAICRPLHYPLLMRPQVCLGLALSSWLGGLIVSVAKTTCIASLSYCGPNVLNQFFCDVSPLLNLSCTHVALTELVDFISAIVIFCGTLLVSLASYSAIGMAVLRMPSAAARRKAFSTCASHLVVVGIFYSAALFIYCRPSRIKSMDLNKVLSVIYTVVTPLCNPIIYCLRNKEVHTVLKKTLHWP

SEQ ID NO: 1081 - protein, 312 aa, Artificial Sequence
  Synthetic
MERSLQLANRSDDQDFILLGLSASKDIKDGLFVIFLTLYLLIFLENMLVIYLISHHELLHKPMYFFLGNLSCLEMCYVSVTMPTLLVGLRSSPYHVSFSFCMAQLFLFMSLIGTKCTLLASMAYDRYVAICCPLHYSVIMRPQVCWGLALSSWVGGLLVSAIKTTCIASLSYCGPNVLNHFFCDVSPLLNLSCTHVALTELIDFISAIIIFCGSLLVALASYVAIGRVLIKMPSAAASHKALSTCASHLLVMGLFYSVVLFMYSRPSHVKSTDLNKVLSVIYTVATPMCSPIIYCLRNREVHAVLRRTPCLC

SEQ ID NO: 1082 - protein, 321 aa, Artificial Sequence
  Synthetic
MSPDGNHSSDPTEFVLAGLPNLNSARVELFSVFLLVYLLNLTGNVLIVGVVRADTRLQTPMYFFLGNLSCLEILLTSVIIPKMLSNFLSRQHTISFAACITQFYFYFFLGASEFLLLAVMSADRYLAICHPLRYPLLMSGAVCFRVALACWVGGLVPVLGPTVAVALLPFCKQAVVQHFFCDSGPLLRLACTNTKKLEETDFVLASLVIVSSLLITAVSYGLIVLAVLSIPSASGRQKAFSTCTSHLIVVTLFYGSAIFLYVRPSQSGSVDTNWAVTVITTFVTPLLNPFIYALRNEQVKEALKDMFRKGNLLLDKCLSEK

SEQ ID NO: 1083 - protein, 321 aa, Artificial Sequence
  Synthetic
MSPDGNHSSDPTEFVLAGLPNLNSARVELFSVFLLVYLLNLIGNVLIVGVVRADTRLQTPMYFFLGNLSCLEILLTSVIIPKMLSNFLSRQHTISFAACITQFYFYFFLGASEFLLLAVMSADRYLAICHPLRYPLLMSGAVCFRVALACWVGGLIPVLGPTVAVALLPFCKQAVVQHFFCDSGPLLRLACTNTKKLEETDFVLASLVIVSSLLITAVSYGLIVLAVLSIPSASGHQKAFSTCTSHLIVVTLFYGSAIFLYVRPSQSGSVDTNWAVTVITTFVTPLLNPFIYALRNEQVKEALKDMFRKGNLLLDKCLSEK

SEQ ID NO: 1084 - protein, 321 aa, Artificial Sequence
  Synthetic
MAPRANQSVGTTEFVLAGFPNLNSTGAEVFSVFLFVYLLTLTGNTLIVVLVGADHRLQTPMYFFLANLSCLEILITSVIIPKMLSNFLSRRHTISFAACITQFYFYFFLGASEFLLLAVMSVDRYLAICRPLHYPLLMNGAVCFRVALACWMGGLLPVLGPTVAVALLPFCKQAVVQHFFCDSGPLLHLACTNTTRLEEADFVLAFLVIMSSLTITGASYGHIVLAVLRIPSASGRQKAFSTCTSHLMVVTLFYGSAIFLYVRPSQSGSVDTNWSVTVITTFVTPLLNPFIYALRNDQVKEALKEMFRKEQSLLGDSLRKK

SEQ ID NO: 1085 - protein, 313 aa, Artificial Sequence
  Synthetic
MGNWSTVTEITLIAFPALLEIRISLFVVLVVTYTLTATGNITIISLIWIDHRLQTPMYFFLSNLSFLDILYTTVITPKLLACLLGEEKTISFAGCMIQTYFYFFLGTVEFILLAVMSFDRYMAICDPLHYTVIMNSRACLLLVLGCWVGAFLSVLFPTIVVTRLPYCRKEINHFFCDIAPLLQVACINTHLIEKINFLLSALVILSSLAFTTGSYVYIISTILRIPSTQGRQKAFSTCASHITVVSIAHGSNIFVYVRPNQNSSLDYDKVAAVLITVVTPLLNPFIYSLRNEKVQEVLRETVNRIMTLIQRKT

SEQ ID NO: 1086 - protein, 318 aa, Artificial Sequence
  Synthetic
MGNWTAAVTEFVLLGFSLSREVELLLLVLLLPTFLLTLLGNLLIISTVLSCSRLHTPMYFFLCNLSILDILFTSVISPKVLANLGSRDKTISFAGCITQCYFYFFLGTVEFLLLTVMSYDRYATICCPLRYTTIMRPSVCIGTVVFSWVGGFLSVLFPTILISQLPFCGSNIINHFFCDSGPLLALACADTTAIELMDFMLSSMVILCCIVLVAYSYTYIILTIVRIPSASGRKKAFNTCASHLTIVIIPSGITVFIYVTPSQKEYLEINKIPLVLSSVVTPFLNPFIYTLRNDTVQGVLRDVWVRVRGVFEKRMRAV

SEQ ID NO: 1087 - protein, 314 aa, Artificial Sequence
  Synthetic
MNPENWTQVTSFVLLGFPSSHLIQFLVFLGLMVTYIVTATGKLLIIVLSWIDQRLHIQMYFFLRNFSFLELLLVTVVVPKMLVVILTGDHTISFVSCIIQSYLYFFLGTTDFFLLAVMSLDRYLAICRPLRYETLMNGHVCSQLVLASWLAGFLWVLCPTVLMASLPFCGPNGIDHFFRDSWPLLRLSCGDTHLLKLVAFMLSTLVLLGSLALTSVSYACILATVLRAPTAAERRKAFSTCASHLTVVVIIYGSSIFLYIRMSEAQSKLLNKGASVLSCIITPLLNPFIFTLRNDKVQQALREALGWLTAVMKL

SEQ ID NO: 1088 - protein, 319 aa, Artificial Sequence
  Synthetic
MNPENWTQVTSFVLLGFPSSHLIQFLVFLGLMVTYIVTATGKLLIIVLSWIDQRLHIQMYFFLRNFSFLELLLVTVVVPKMLVVILTGDHTISFVSCIIQSYLYFFLGTTDFFLLAVMSLDRYLAICRPLRYETLMNGHVCSQLVLASWLAGFLWVLCPTVLMASLPFCGPNGIDHFFRDSWPLLRLSCGDTHLLKLVAFMLSTLVLLGSLALTSVSYACILATVLRAPTAAERRKAFSTCASHLTVVVIIYGSSIFLYIRMSEAQSKLLNKGASVLSCIITPLLNPFIFTLRNDKVQQALREALGWLTAVMKLRVTSQ

SEQ ID NO: 1089 - protein, 312 aa, Artificial Sequence
  Synthetic
MRNGTVITEFILLGFPVIQGLQTPLFIAIFLTYILTLAGNGLIIATVWAEPRLQIPMYFFLCNLSFLEIWYTTTVIPKLLGTFVVARTVICMSCCLLQAFFHFFVGTTEFLILTIMSFDRYLTICNPLHHPTIMTSKLCLQLALSSWVVGFTIVFCQTMLLIQLPFCGNNVISHFYCDVGPSLKAACIDTSILELLGVIATILVIPGSLLFNMISYIYILSAILRIPSATGHQKTFSTCASHLTVVSLLYGAVLFMYLRPTAHSSFKINKVVSVLNTILTPLLNPFIYTIRNKEVKGALRKAMTCPKTGHAK

SEQ ID NO: 1090 - protein, 312 aa, Artificial Sequence; identical to SEQ ID NO: 1089
  Synthetic

SEQ ID NO: 1091 - protein, 309 aa, Artificial Sequence
  Synthetic
MTSARNASHTVSHFILLGFPCRREIQIFLFSIFFMIYILTLLGNMAIVYAVYWDHRLHTPMYILLANFSFLEICYVNSDVPNMLVNFLSTTKTISFTRCLLQLYFFFSLGTTECLFLSIMAYDRFLAICRPLHYPTVMTTMFCGNLVIFCWVYGFLWFLIPVILITQLPFCGPNVIDDFLCDLGPLLALACVPIPGTVLICGTMSSLLIFGTFFYIIGSYTLVLRAVIRMPSSAGSKKAFSTCSSHLAVVFLFYGSVMITYVSPGSGQAKGMQKFTTLFYSVMTPFFNPMIYSLRNKEMKDALKKVVGG

SEQ ID NO: 1092 - protein, 315 aa, Artificial Sequence
  Synthetic
MNVSEPNSSFAFVNEFILQGFSCEWTIQIFLFSLFTTTYALTITGNGAIAFVLWCDRRLHTPMYMFLGNFSFLEIWYVSSTVPKMLVNFLSEKKNISFAGCFLQFYFFFSLGTSECLLLTVMAFDQYLAICRPLLYPNIMTGHLYAKLVILCWVCGFLWFLIPIVLISQMPFCGPNIIDHVVCDPGPRFALDCVSAPRIQLFCYTLSSLVIFGNFLFIIGSYTLVLKAMLGMPSSTGRHKAFSTCGSHLAVVSLCYSSLMVMYVSPGLGHSTGMQKIETLFYAMVTPLFNPLIYSLQNKEIKAALRKVLGSSNII

SEQ ID NO: 1093 - protein, 315 aa, Artificial Sequence
  Synthetic
MNVSEPNSSFAFVNEFILQGFSCEWTIQIFLFSLFTTIYALTITGNGAIAFVLWCDRRLHTPMYMFLGNFSFLEIWYVSSTVPKMLVNFLSEKKNISFAGCFLQFYFFFSLGTSECLLLTVMAFDQYLAICRPLLYPNIMTGHLYAKLVILCWVCGFLWFLIPIVLISQKPFCGPNIIDHVVCDPGPLFALDCVSAPRIQLFCYTLSSLVIFGNFLFIIGSYTLVLKAVLGMPSSTGRHKAFSTCGSHLAVVSLCYSPLMVMYVSPGLGHSTGMQKIETLFYAMVTPLFNPLIYSLQNKEIKAALRKVLGSSNII

SEQ ID NO: 1094 - protein, 317 aa, Artificial Sequence
  Synthetic
GLMNVSEPNSSFAFVNEFILQGFSCEWTIQIFLFSLFTTIYALTITGNGAIAFALWCDRRLHTPMYMFLGDFSFLEIWYVFSTVPKMLVNFLSEKTNISFAGCFLQFYFFFSLGTSECLLLTVMAFDQYLAICRPLHYPNIMTGHLCAKLVILCWVCGFLWFLIPIVLISQMPFCGPNIIDHVVCDPGPLFALDCVSAPRIQLFCYTLNSLVIFGNFLFIIGSYTIVLKAVLGTPSSTGRHKAFSTCGSHLAVVSLCYGSLMVMYVSPGLGHSTGMQKIVTLFYAMVTPLFNPLIYSLQNKEIKAALRKVLGSSNII

SEQ ID NO: 1095 - protein, 314 aa, Artificial Sequence
  Synthetic
MNVSEGSTVTYFVLLGFPGPWKIQIILFSLILLLYMITLTGNMAIICAVRWNQQLHTPMYMFLANFSFLEIWYVTCTVPNMLVNSLSKTKTISFTGCFTQFYFFFSLGTTECFFLCAMAYDRYLAICYPLHYPSIMTRQFCSILMSLCWIIGFSAHLIPIFFISQLSFCGPNIIDHFLCDVDPLIALSCTPTHIIRHVFYSISTLIIILTGLYILGSYALELRAVLQVPSSDGRQKAFSTCGSHLLVVSLFYGTIMVMYVSPTSGNSVDMNKIITLIYSVVTPALNPFIYSLRNKDMKYALHHVFFGNSIMQNL

SEQ ID NO: 1096 - protein, 307 aa, Artificial Sequence
  Synthetic
MNVSEGSTVTYFVLLGFPGPWKIQITLFSLILLLYMITLTGNMAIICAVRWNQQLHTPMYMFLANFSFLEIWYVTCTVPNMLVNSLSKTKTISFTGCFTQFYFFFSLGTTECFFLCAMAYDRYLAICYPLHYPSIMTRQFCSILMSLCWIIGFSAHLIPIFFISQLSFCGPNIIDHFLCDVDPLMVLSCTPTPIIRHVFYSISTIFIVLTCLYILGSYTLVLRAVLQVSSSDGRQKAFSTCGSHLLVVSLFYGTIMVMYVTPKSSNSVAMHKIITLIYSVVTPALNPFIYSLRNKDMKYALHNVFFG

SEQ ID NO: 1097 - protein, 320 aa, Artificial Sequence
  Synthetic
PQRNLDAMNRSAAHVTEFVLLGFPGSWKIQIFLFVLFLVFYVLTLLGNGAIICAVRCDSRLHTPMYFLLGNFSFLEIWYVSSTIPNILANILSKTKAISFSGCFLQFYFFFSLGTTECLFLAVMAYDRYLAICRPLHYPTIMTRRLCCILVSSCWLIGFLGYPIPIFSISQLPFCGSNIIDHFLCDMDPLMALSCAPAPITEFIFYAQSSFVLFFTIAYILRSYILLLRAVFQVPSAAGRRKAFSTCGSHLVVVSLFYGTVMVMYVSPTYGIPILMQKILTLVYSVMTPLFNPLIYSLRNKDMKLALRNVLLGMRIVKNM

SEQ ID NO: 1098 - protein, 313 aa, Artificial Sequence
  Synthetic
MNRSAAHVTEFVLLGFPGSWKIQIFLFVLFLVFYVLTLLGNGAIICAVRCDSRLHTPMYFLLGNFAFLEIWYVSSTIPNILANILSKTKAISFSGCFLQFYFFFSLGTTECLFLAVMAYDRYLAICRPLHYPTIMTRRLCCILVSSCWLIGFLGYPIPIFSISQLPFCGSNIIDHFLCDMDPLMALSCAPAPITEFIFYAQSSFVLFFTIAYILRSYILLLRAVFQVPSAAGRRKAFSTCGSHLVVVSLFYGTVMVMYVSPTYGIPILMQKILTLVYSVMTPLFNPLIYSLRNKDMKLALRNVLLGMRIVKNM

SEQ ID NO: 1099 - protein, 320 aa, Artificial Sequence
  Synthetic
PFRYLDAMNRSVAHVTEFVLLGFPGSWKIQIFLFVLFLVFYVLTLLGNGAIICAVRCDSRLHTPMYFLLGNFAFLEIWYVSSTIPNILANILSKTKAISFSGCFLQFYFFFSLGTTECLFLAVMAYDRYLAICRPLHYPTIMTRRLCCILVSSCWLIGFLGYPIPIFSISQLPFCGSNIIDHFLCDMDPLMALSCAPAPITEFIFYAQSSFVLFFTIAYILRSYILLLKAIFQVPSAAGRRKAFSTCGSHLVVVSLFYGTVMIMYMSPTYGISTLMQKILTLVYSVMTPLFNPLIYSLRNKDMKLALRKVLLGMRIVKNI

SEQ ID NO: 1100 - protein, 320 aa, Artificial Sequence
  Synthetic
FFVDLRPMNRSTHIMTEFILLGFPGCWKIQIFLFSLFLVIYVLTLLGNGAIIYAVRCNPLLHTPMYFLLGNFAFLEIWYVSSTIPNMLVNILSKTKAISFSGCFLQFYFFFSLGTTECLFLAVMAYDRYLAICHPLQYPAIMTVRFCGKLVSFCWLIGFLGYPIPIFYISQLPFCGPNIIDHFLCDMDPLMALSCAPAPITECIFYTQSSLVLFFTSMYILRSYILLLTAVFQVPSAAGRRKAFSTCGSHLVVVSLFYGTVMVMYVSPTYGIPTLLQKILTLVYSVTTPLFNPLIYTLRNKDMKLALRNVLFGMRIRQNS

SEQ ID NO: 1101 - protein, 314 aa, Artificial Sequence
  Synthetic
MNRSATHIVTEFILLGFPGCWKIQIFLFSLFLVIYVLTLLGNGAIIYAVRCNPLLHTPMYFLLGNFAFLEIWYVSSTIPNMLVNILSKTKAISFSGCFLQFYFFFSLGTTECLFLAVMAYDRYLAICHPLQYPAIMTVRFCGKLVSFCWLIGFLGYPIPIFYISQLPFCGPNIIDHFLCDMDPLMALSCAPAPITECIFYTQSSLVLFFTSMYILRSYILLLTAVFQVPSAAGRRKAFSTCGSHLVVVSLFYGTVMVMYVSPTYGIPTLLQKILTLVYSVTTPLFNPLIYTLRNKDMKLALRNVLFGMRIRQNS

SEQ ID NO: 1102 - protein, 318 aa, Artificial Sequence
  Synthetic
FLTALGPQNRTMHFVTEFVLLGFHGQREMQSCFFSFILVLYLLTLLGNGAIVCAVKLDRRLHTPMYILLGNFAFLEIWYISSTVPNMLVNILSEIKTISFSGCFLQFYFFFSLGTTECFFLSVMAYDRYLAICRPLHYPSIMTGKFCIILVCVCWVGGFLCYPVPIVLISQLPFCGPNIIDHLVCDPGPLFALACISAPSTELICYTFNSMIIFGPFLSILGSYTLVIRAVLCIPSGAGRTKAFSTCGSHLMVVSLFYGTLMVMYVSPTSGNPAGMQKIITLVYTAMTPFLNPLIYSLRNKDMKDALKRVLGLTVSQN

SEQ ID NO: 1103 - protein, 318 aa, Artificial Sequence; identical to SEQ ID NO: 1102
  Synthetic

SEQ ID NO: 1104 - protein, 318 aa, Artificial Sequence
  Synthetic
FLTAFGSKNSSIHFVTEFILLGFSNQGEMQSFFFCSILILYLLTLLGNGTIVCAVRWDQRLHTPMYIFLGNFAFLEIWYVSSTIPNMLVNILSENKTISFSACFLQFYFFFSLGTTECFFLSAMAYDRYLAICRPLHYPSIMTRKFCVILICICWVSGFLCYPVPIVLISQLPFCGPNIIDHFVCDPGPLFALSCVPAPSTELLCYTFNSMIIFGPFFCILGSYTLVLRAVFRVPSGAGRTKAFSTCGSHLVVVSLFYGTLMVMYVSPTSGNPAGMQKIVTLIYSALTPLLNPLIYTLRNKEMKNALKKLLKLTTIQN

SEQ ID NO: 1105 - protein, 311 aa, Artificial Sequence
  Synthetic
MKTLSSPSNSSTITGFILLGFPCPREGQILLFVTFFIVYILILMGNASIICAVYCDQSLHTPMYFLLANFSFLEIWYVTSTVPNMLANFLSDTKVISFSGCFLQFYFFFSFGSTECFFLAVMAFDRYLAICRPLHYSSLMTGRLRNTLVTSCWVLGFLWFPVPIIIISQMSFCGSRIIDHFLCDPGPLLALACSRVPLIEVFWSIIMSMLLVIPFLFIMGTYILVLRAVFRLPSRDGQKKAFSTCGSHLTVVSLFYCSVMKMYLSPTSEHEAGMQKLVTLFYSVGTPLLNPVIYSLRNKDMKNALQKILRT

SEQ ID NO: 1106 - protein, 311 aa, Artificial Sequence
  Synthetic
MKTLSSPSNSSTITGFILLGFAYPREGQILLFVIFFIVYILILMGNASIICAVYCDQRLHTPMYLLLANFSFMEIGYVTSTVPNMLANFLSDTKVISFSGCFLQFYFFFSFGSTECFFLAVMAFDRYLAICRPLHYSSLMTGRLRNTLVTSCWVLGFLWFPVPIIIISQMSFCGSRIIDHFLCDPGPLLALACSRVPLIEVFWSIIMSMLLVIPFLFIMGTYILVLRAVFRLPSREGQKKAFSTCGSHLTVVSLFYCSVMIMYLSPTSEHEAGMQKLVTLFYSVGTPLLNPMIYSLRNKDMKNALQKILRT

SEQ ID NO: 1107 - protein, 311 aa, Artificial Sequence
  Synthetic
MKTLSSPSNSSTITGFILLGFPCPREGQILLFVIFFVVYLLILMGNASIICAVYCDQRLHTPMYLLLANFSFLEIWYVTSTVPNMLANFLSDNKIISFAGCFLQFYFFFSFGSTECFFLAVMAFDRYLAICRPLHYPSLMTRRLCNILVISCWVLGFLWFPVPIIIISQMSFCGSRIIDHFLCDPGPLLALACSRAPLMEVFWTIIMSILLVIPFLFIMGSYILVLRTVFRLPSRDGQKKAFSTCGSHVTVVSLFYGSVMIMYMSPSSGHEAGMQKIVTLFYSVGTPLLNPVIYSLRNKDMKNALQKILRT

SEQ ID NO: 1108 - protein, 309 aa, Artificial Sequence
  Synthetic
MKTLSSSNNTITGFILLGFPCPREGQILLFVLFFIVYLLTLMGNASIICAVCCDQKLHTPMYLLLANFSFLEICYVTSTVPNMLANFLSENKVISFAGCFLQFYFFFSLGSTECFFLAVMAFDRYLAICRPLHYPALMTGHLCNILVISCWVLGFLWFPVPIIIISQMSFCGSRIIDHFLCDPGPLLALTCSRAPLMEVFWAILGSMLLFIPFFCIMGSYILVLRAVFRVPSRDGQKKAFSTCGSHLTVVSLFYGSVMIMYLSPTSEHEAGMQKLVTLFYSVVTPLINPVIYSLRNKDMKNALQKILKT

SEQ ID NO: 1109 - protein, 311 aa, Artificial Sequence
  Synthetic
MKAFSSPSNSSIITGFILLGFPCPKEGQILLFVLFFIIYILTLMGNASIICAVCYDKKLHSPMYLLLANFSFLEIWYVTSTVPNMLANFLSDTKVISFSGCFLQFYFFFSLGSTECFFLAVMAFDRYLAICRPLHYPSLMTGRLCNILVISCWVLGFLWFPVPIIIISQMSFCGSRIIDHFLCDPGPLLALTCVRNSLIEMTSSTLSSLLLFVPFFFIMGSYALVMRAVLRVPSAAGRRKAFSTCGSHLTVVSLFYGSVMVMYVSPTSEHAAGVQKLVTLFYSVVTPLLNPVIYSLRNRDMKHAMKKLLKM

SEQ ID NO: 1110 - protein, 321 aa, Artificial Sequence
  Synthetic
MKIFSSPSNSSTITGFILLGFPCPREGQILLFVLFSIVYLLTLMGNASIICAVYCDQKLHIPMYLLLANFSFLEIWYVTSTVPNMLANFLSDTKVISFSGCFLQFYFFFSLGSTECFFLAVMAFDRYLAICRPLHYPALMTGRLCNILVISCWILGFLWFPVPIIIISQVSFCGSRIIDHFLCDPGPLLALTCKKSPLIELVFSILSPLPLIIPFVFIMGSYTLVLAAVLKVPSASGKRKAFSTCGSHLAVVALFYGSVLVMYGSPTSEHEAGMQKIVTLFYSVLTPLLNPVIYSLRNKHMKIALKEILRKNWSTKKALGN

SEQ ID NO: 1111 - protein, 311 aa, Artificial Sequence
  Synthetic
MKIFNSPSNSSTFTGFILLGFPCPREGQILLFVLFTVVYLLTLMGNGSIICAVHWDQRLHAPMYILLANFSFLEICYVTSTVPSMLANFLSDTKIISFSGCFLQFYFFFSLGSTECFFLAVMAFDRYLAICRPLRYPTIMTRRLCTNLVVNCWVLGFIWFLIPIVNISQMSFCGSRIIDHFLCDPAPLLTLTCKKGPVIELVFSVLSPLPVFMLFLFIVGSYALVVRAVLRVPSAAGRRKAFSTCGSHLAVVSLFYGSVLVMYGSPPSKNEAGKQKTVTLFYSVVTPLLNPVIYSLRNKDMRKALKKFWGT

SEQ ID NO: 1112 - protein, 316 aa, Artificial Sequence
  Synthetic
MMTLSWENQTVIVEFVLRGFSSILQLNISLFIMFCIFYILTISGNILIVFLVLCNHALHTPMYFFLVNLSFLEVCYTSNIVPKMLLIIIADQKTISVVGCLAQFYFFGSLAATECLLLAVMSYDRYLAICQPLRYPILMTGSLCFRLAIGSWFCCFFLTAITMVLLCRQNFCGPNEIDHFFCDFAPLIHLSCMDTSLIETVAFATSSAVTLVPFFLITISYSCILIAILRIPSGTGRKKAFSTCSSHLTVVTVFYGTLIATYLVPSANSSQYLRKGFSLLYTILTPMFNPIIYSLRNRDIHEALKKCLSKKSDFLI

SEQ ID NO: 1113 - protein, 316 aa, Artificial Sequence
  Synthetic
MPAVGPENATMVVTEFFLLGFGDLKELNALLFLVFGIVYLLTVSANLLLVVLVCTQQGLQTPMYFFLANLSCLEVCYTSNIVPRMLVDLLREHRMISMLGCITQLYFFGALGSTECYLLAVMSYDRYLAICRPLHYSTLLHGTLCVELAIGSWLCGFSVAAFQAAMLSSLNFCGGNEVDHFFCDLKPLQKLSCSDPHLVNLVCMSLTSLVTLVPFGLTLVSYWKILAVVLCIPSIIGRQKAFSTCSSHLVVVTLFYGTLILVYAVPLAGQYPVLNKTFSLFYTVITPMCNPLIYSLKNRDVKEALKKIWFCNFSFT

SEQ ID NO: 1114 - protein, 309 aa, Artificial Sequence
  Synthetic
MSGVSENQTTWLTLVGFGKLKHLGFLPFALFLAIYVATVGGNILIVLAVASSRTLHTPMYFFLCHFSLLEIGYTSNIVPRLLQSFLEGGDLISLVGCLAQFYVFASLAAAECLMLSAMSYDRYLAICHPLHYPVLMSTWCCVRLATGAWFSGFFFSAFTLALAAPLSLCPGRVIDHYFCDFAPVVGLFCGEVWVMWGAGVSISGCLTLAPFLLIVASYVFILRAVLRIPSSHGRQKAFSTCSSHLSVVAVFYGTLIVVYVAPTEHMPALLRKAFSVFYTVLTPMFNPIIYSLKNQEVKWALRRLCRQLL

SEQ ID NO: 1115 - protein, 309 aa, Artificial Sequence
  Synthetic
MSGVSENQTTWLTLVGFGKLKHLGFLPFALFLAIYVATVGGNILIVLAVASSRTLHTPMYFFLCHFSLLEIGYTSNIVPRLLQSFLEGGDLISLVGCLAQFYVFASLAAAECLMLSAMSYDRYLAICHPLHYPVLMSTWCCVRLATGAWFSGFFFSAFTLALAAPLSLCPGRVIDHYFCDFAPVVGLFCGEVWVMWGAGLSISGCLTLSPFLLIVASYVFILRAVLRIPSSQGRQKAFSTCSSHLSVVALFYGTLIVVYVAPTEHMPALLRKAFSVFYTVLTPMFNPIIYSLKNQEVKWALRRLCRQLL

SEQ ID NO: 1116 - protein, 313 aa, Artificial Sequence
  Synthetic
MEIVSTGNETITEFVLLGFYDIPELHFLFFIVFTAVYVFIIIGNMLIIVAVVSSQRLHKPMYIFLANLSFLDILYTSAVMPKMLEGFLQEATISVAGCLLQFFIFGSLATAECLLLAVMAYDRYLAICYPLHYPLLMGPRRYMGLVVTTWLSGFVVDGLVVALVAQLRFCGPNHIDQFYCDFMLFVGLACSDPRVAQVTTLILSVFCLTIPFGLILTSYARIVVAVLRVPAGASRRRAFSTCSSHLAVVTTFYGTLMIFYVAPSAVHSQLLSKVFSLLYTVVTPLFNPVIYTMRNKEVHQALRKILCITETLD

SEQ ID NO: 1117 - protein, 313 aa, Artificial Sequence; identical to SEQ ID NO: 1116
  Synthetic

SEQ ID NO: 1118 - protein, 313 aa, Artificial Sequence
  Synthetic
MGILSTGNQTVTEFVLLGFHEVPGLHLLFFSVFTILYASIITGNMLIAVVVVSSQRLHTPMYFFLVNLSFIEIVYTSTVVPKMLEGFLQEATISVAGCLLQFFVFGSLATDECFLLAVMAYDRYLAICHPLRYPHLMGPQWCLGLVLTVWLSGFMVDGLVVALMAQLRFCGPNLVDHFYCDFSPLMVLACSDTQVAQVTTFVLSVVFLTVPFGLVLISYAQIVVTVLRVPSGTRRTKAFSTCSSHLAVVSTFYGTLMVLYIVPSAVHSQLLSKVIALLYTVVTPIFNPVIYTLRNQEVQQALRRLLYCKPTEM

SEQ ID NO: 1119 - protein, 313 aa, Artificial Sequence; identical to SEQ ID NO: 1118
  Synthetic

SEQ ID NO: 1120 - protein, 318 aa, Artificial Sequence
  Synthetic
SPNLIDMGNLTAIKEFLLLGFGSLHGLQFFLFGMFLGIYIMTLMGNILILTVTSSDHSLQTPMYFFLSNFSFLEIWYTTSIAPKMLKTLLSGPEAISFTGCVAQFYFFGSMAVVECFLLASMSYDRYLAICSPLRYPSLMNFHTCFLLAGGSWVGGFLTPVVTVTMTFQLQFCASNEIDHFFCDLAPVLKLACSDPTEVKRTTFLMASFVTMGPFLLTVASYINIVVAVFRMPSAAGKQRAFSTCSSHLIVVSLYYGTLGTVYAIPTATQATALNKVFSLLYTVVTPMVNPIVYSLRNKDVKKAVQKLLSKWKHPMKT

SEQ ID NO: 1121 - protein, 318 aa, Artificial Sequence
  Synthetic
MAIIGEENMTQISEIILLGFGDLHGLQFLLFGLFLAIYVMTLLGNIVILTVVSTDCSLHTPMYFFLGHFSFLEISYTTTIEPVMLWTLLSAHVPISLPACACQFYFFASLVATECFLLAVMSYDRYIAICNPLHYSSIMDSWGCFQLALASWLAGFLAPILLMILIFRLTFCSANEIDHFFCDLKPIMKLACTNTQVAEMTSFICTSLFALGPFILTLASYIHIICTILRIPSTTGKQRAFSTCSSHLIVVSLYYGTLGIVYGFPSMPQYESILKLLSLLYTVFTPAANPIIYTLRNKDVKVALRKLTQWHTYLVKEG

SEQ ID NO: 1122 - protein, 318 aa, Artificial Sequence
  Synthetic
MESPNRTTIQEFIFSAFPYSWVKSVVCFVPLLFIYAFIVVGNLVIITVVQLNTHLHTPMYTFISALSFLEIWYTTATIPKMLSSLLSERSISFNGCLLQMYFFHSTGICEVCLLTVMAFDHYLAICSPLHYPSIMTPKLCTQLTLSCCVCGFITPLPEIAWISTLPFCGSNHLEHIFCDFLPVLRLACTDTRAIVMIVDVIHAVEIITAVMLIFMSYDGIVAVILRIHSAGGRRTAFSTCVSHFIVFSLFFGSVTLMYLRFSATYSLFWDIAIALAFAVLSPFFNPIIYSLRNKEIKEAIKKHIGQAKIFFSVRPGTS

SEQ ID NO: 1123 - protein, 318 aa, Artificial Sequence
  Synthetic
MESPNRTTIQEFIFSAFPYSWVKSVVCFVPLLFIYAFIVVGNLVIITVVQLNTHLHTPMYTFISALSFLEIWYTTATIPKMLSSLLSERSISFNGCLLQMYFFHSTGICEVCLLTVMAFDHYLAICSPLHYPSIMTPKLCTQLTLSCCVCGFITPLPEIAWISTLPFCGSNHLEHIFCDFLPVLRLACTDTRVMIQVVDVIHAVEIITAVMLIFMSYDGIVAVILRIHSAGGRRTAFSTCVSHFIVFSLFFGSVTLMYLRFSATYSLFWDIAIALAFAVLSPFFNPIIYSLRNKEIKEAIKKHIGQAKIFFSVRPGTS

SEQ ID NO: 1124 - protein, 317 aa, Artificial Sequence
  Synthetic
MGFSNWTTAQEFIFSAFPCSWGDSVICFIPLLFIYAFIIVGNLVIITVVQLNAHLHTPMYFFISALSFLEIWYTTATIPKMLSSLLSERRSITLNGCVLQMYFFHSTGISEVCLLTAMAFDRYLAICSPLHYPTIMTSRLCAQLTLGCCVCGFLTPLPEIAWISTLPFCGSNHLEHIFCDFLPVLRLACTDTHTIVMIVDIVHAVEIITAVMLIFMSYVGIVAVILRIRSAEGRRKAFSTCVSHLTVFLLFFGSVALMYLRFSATYSLFWDTAIALAFAVLFPFFNPIIYSLRNKEIKEAIKKHIGQILIGKSRNLP

SEQ ID NO: 1125 - protein, 315 aa, Artificial Sequence
  Synthetic
MESGNQSTVTEFIFTGFPQLQDGSLLYFFPLLFIYTFIIIDNLLIFSAVRLDTHLHNPMYNFISIFSFLEIWYTTATIPKMLSNLISEKKAISMTGCILQMYFFHSLENSEGILLTTMAIDRYVAICNPLRYQMIMTPRLCAQLSAGSCLFGFLILLPEIVMISTLPFCGPNQIHQIFCDLVPVLSLACTDTSMILIEDVIHAVTIIITFLIIALSYVRIVTVILRIPSSEGRQKAFSTCAGHLMVFPIFFGSVSLMYLRFSDTYPPVLDTAIALMFTVLAPFFNPIIYSLRNKDMNNAIKKLFCLQKVLNKPGG

SEQ ID NO: 1126 - protein, 319 aa, Artificial Sequence
  Synthetic
STRNMESGNQSTVTEFIFTGFPQLQDGSLLYFFPLLFIYTFIIIDNLLIFSAVRLDTHLHNPMYNFISIFSFLEIWYTTATIPKMLSNLISEKKAISMTGCILQMYFFHSLENSEGILLTTMAIDRYVAICNPLRYQMIMTPRLCAQLSAGSCLFGFLILLPEIVMISTLPFCGPNQIHQIFCDLVPVLSLACTDTSMILIEDVIHAVTIIITFLIIALSYVRIVTVILRISSSEGRQKAFSTCAGHLMVFLIFFGSVSLMYLRFSDTYPPVLDTAIALMFTVLAPFFNPIIYSLRNKDMNNAIKKLFCLQKVLNKPGG

SEQ ID NO: 1127 - protein, 305 aa, Artificial Sequence
  Synthetic
MCILFFCRKLQDGSLLYFFPLLFIYTFIVIGNLLIFFAVRLDSHLHNPMYNFINIFSFLEIWYTTATIPKMLSNLVNEKKSITITGCLLQMYFFHSLGNPEGILLISMAVDRYIAICNPLRYQMTMTPRLCVQLSAASCIFGFLILLPESVMISTLPFCGPNQIHQIFCDLVPVLSLACTDTSVIVIEDVIHAVAIIITVLTIALSYVRIVIMILRIPSAEGRKKAFSTCAGHLMVFLIFFGSVSLMHLRFNATYLPVLETAIALMFIVLAPFFNPIIYSLRNKDMENAIKRLFCLHKVLNTSES

SEQ ID NO: 1128 - protein, 315 aa, Artificial Sequence
  Synthetic
MRINRTTSVTEFLFSGFPQFEDGSFLFFIPLFFIYIFIVIGNLIVFFAVRMDTRLHNPMYNFISIFSFLEIWYTTATIPKMLSNLISKQRTISLIGCLLQMYFFHSLGNSEGILLTTMAIDRYVAICNPLRYPTIMTPRLCAHLSAGSCIFGFLVLLPEIAWISTLPFCGPNQIHQIFCDFEPVLRLACTDTSMILVEDVVHAVAIIFSVLVIAISYMRIITVILRIPSGEGRRKAFSTCAAHLGVFLMFYGSVSLMYLRFSATFPPILDTAIALMFAVLAPFFNPIIYSLRNKDMKIAIKKLLCSQKMLPTSAS

SEQ ID NO: 1129 - protein, 313 aa, Artificial Sequence
  Synthetic
MDKKNQTKVTEFYFSDFPQFEDGGLLLFILLLCVYLFIVVGDAVIFLDVQLDVRLHNPMYSFISIFSFLEICYTTVTIPQMLYNLVSKEKTISFIGCLLQMYFFHSFGVTESLVLTIMAIDRYVAICNPLRYAIIITPKLCTQLSTGSFTLGFLMLLPEIVWISTLPFCGPNQIHQLFCDLEPVLLLACTDTSMILVEDVIHAISILSCVSIISLSYLRIITVVLKIPSGESRQKAFSTCTAHITIFVLFFGSVALMYLRFSVTFQPLLEKVIALMFAVLAPFVNPIIYSLRNKDMKDAIKKMFGSILTVSGS

SEQ ID NO: 1130 - protein, 317 aa, Artificial Sequence
  Synthetic
MTQLTASGNQTMVTEFLFSMFPHAHRGGLLFFIPLLLIYGFILTGNLIMFIVIQVGMALHTPLYFFISVLSFLEICYTTTTIPKMLSCLISEQKSISVAGCLLQMYFFHSLGITESCVLTAMAIDRYIAICNPLRYPTIMIPKLCIQLTVGSCFCGFLLVLPEIAWISTLPFCGSNQIHQIFCDFTPVLSLACTDTFLVVIVDAIHAAEIVASFLVIALSYIRIIIVILGMHSAEGHHKAFSTCAAHLAVFLLFFGSVAVMYLRFSATYSVFWDTAIAVTFVILAPFFNPIIYSLKNKDMKEAIGRLFHYRAGWAGK

SEQ ID NO: 1131 - protein, 317 aa, Artificial Sequence
  Synthetic
MTQLTASGNQTMVTEFLFSMFPHAHRGGLLFFIPLLLIYGFILTGNLIMFIVIQVGMALHTPLYFFISVLSFLEICYTTTTIPKMLSCLISEQKSISVAGCLLQMYFFHSLGITESCVLTAMAIDRYIAICNPLCYPTIMIPKLCIQLTVGSCFCGFLLVLPEIAWISTLPFCGSNQIHQIFCDFTPVLSLACTDTFLVVIVDAIHAAEIVASFLVIALSYIRIIIVILGMHSAEGHHKAFSTCAAHLAVFLLFFGSVAVMYLRFSATYSVFWDTAIAVTFVILAPFFNPIIYSLKNKDMKEAIGRLFHYRAGWAGN

SEQ ID NO: 1132 - protein, 318 aa, Artificial Sequence
  Synthetic
MTQLVASQNQTMVIEFLFSVFPPLYEGGLLFFILLILVYAFIISGNLVIFVAVQLDMALHTPMYFFISVLSFLEIWYTTTTIPKMLSSLVSEKKTISLGGCLMQMYFFHSLGITEGCVLTAMSIDRYIAICYPLRYPTIMTSKLCIQLTAGSCFCGFLLVLPEIAWIATLPFCGSNKIHQIFCDFTPVLSLACTDTSLVVIVDAIHAVEILASFLVIALSYIRIIMVILGMPSAEGRHKAFSTCAAHLAVFLLFFGSVAVMYLRFSATYSVFWDTVIAVTFVILAPFLNPIIYSLRNKEMKDAIGRLFHQKRDVRAQK

SEQ ID NO: 1133 - protein, 312 aa, Artificial Sequence [sequence omitted]

SEQ ID NO: 1134 - protein, 312 aa, Artificial Sequence
  Synthetic
MDTGNWSQVAEFIILGFPHLQGVQIYLFLLLLLIYLMTVLGNLLIFLVVCLDSRLHTPMYHFVSILSFSELGYTAATIPKMLANLLSEKKTISFSGCLLQIYFFHSLGATECYLLTAMAYDRYLAICRPLHYPTLMTPTLCAEIAIGCWLGGLAGPVVEISLISRLPFCGPNRIQHVFCDFPPVLSLACTDTSINVLVDFVINSCKILATFLLILCSYVQIICTVLRIPSAAGKRKAISTCASHFTVVLIFYGSILSMYVQLKKSYSLDYDQALAVVYSVLTPFLNPFIYSLRNKEIKEAVRRQLKRIGILA

SEQ ID NO: 1135 - protein, 312 aa, Artificial Sequence
  Synthetic
MGTGNWSQVIEFIILGFPHFQGVQIYLFFLLLSIYLTTILGNLLIFLVVYLDSRLHTPMYRFVSILSFLELGYTAATIPKMLANLLSEKKTISFSGCLLQIYFFHSLGATECYLLTAMAYDRYLAICRPLHYPTLMTQSLCIKIAIGCWLGGLAGPVVEISLVSRLPFCGPNHIQHIFCDFPPVLSLACTDTSVNVLVDFIINSCKILATFLLILSSYLQIIRTVLKIPSAAGKKKAFSTCASHLTVVLIFYGSILFMYVRLKKSYSLDYDRALAVVYSVITPFLNPFIYSLRNKEIKEALKRQLMRTGILR

SEQ ID NO: 1136 - protein, 312 aa, Artificial Sequence
  Synthetic
MGTGNWSQVIEFIILGFPHFQGVQIYLFFLLLSIYFTTILGNLLIFLVVYLDSRLHTPMYRFVSILSFLELGYTAATIPKMLANLLSEKKTISFSGCLLQIYFFHSLGATECYLLTAMAYDRYLAICRPLHYPTLMTQSLCIKIAIGCWLGGLAGPVVEISLVSRLPFCGPNHIQHIFCDFPPVLSLACTDTSVNVLVDFIINSCKILATFLLILSSYLQIIRTVLKIPSAAGKKKAFSTCASHLTVVLIFYGSILFMYVRLKKSYSLDYDRALAVVYSVITPFLNPFIYSLRNKEIKEALKRQLMRTGILR

SEQ ID NO: 1137 - protein, 317 aa, Artificial Sequence
  Synthetic
MDQYNHSSLAEFVFLGFASVGYVRGWLFVLLLLAYLFTICGNMLIFSVIRLDAALHTPMYHFVSVLSFLELWYTATTIPKMLSNILSEKKTISFAGCLLQTYFFHSLGASECYLLTAMAYDRYLAICRPLHYPIIMTTTLCAKMAAACWTCGFLCPISEVILASQLPFCAYNEIQHIFCDFPPLLSLACKDTSANILVDFAINAFIILITFFFIMISYARIIGAVLKIKTASGRKKAFSTCASHLAVVLIFFGSIIFMYVRLKKSYSLTLDRTLAIVYSVLTPMVNPIIYSLRNKEIIKAIKRTIFQKGDKASLAHL

SEQ ID NO: 1138 - protein, 317 aa, Artificial Sequence; identical to SEQ ID NO: 1137
  Synthetic

SEQ ID NO: 1139 - protein, 317 aa, Artificial Sequence
  Synthetic
MDQHNFSSLTEFVLLGFPNVEHIRSCLFVLLLLVYLFTIGGNMLIFLVIRLDAALHKPMYHFVSVLSFLELWYTATTIPKMLANLLSEKKTISFAGCLLQTYFFHSLGASECYLLTAMAYDRYLAICRPLHYPSIMTTALCVKMAAGCWTCGFLCPISEVILVSQLPFCNYNEIPHIFCDFPPLLSLACKDTSTNVLVDFAVNAFIILITFLFIMASYGRIIGAVLKIKTAAGRRKAFSTCASHLIVVLIFFGSIIFMYVRLKKSYSLTLDRTLAVVYSVLTPLANPIIYSLRNKELIQAIKRTFFKKVEKASPTHH

SEQ ID NO: 1140 - protein, 314 aa, Artificial Sequence
  Synthetic
MDHVNYTWTRTFILAGFTTSGALRPLAFLGTLCIYLLTLAGNLFIIVLVQADSGLSTPMYFFISVLSFLELWYVSTTVPTLLHTLLHGHSPIPSSACFVQLYVFHSLGMTECYLLGVMALDRYLAICRPLHYHALMSKQVQLWLAGATWVAGFSAALVPACLTASLPYCLKEIAHYFCDLAPLMRLACVSTRWHARVHGAVIGVATGCNFVLILGLYGGILTAVLKLPSAASRAKAFSTCSSHMTVVALFYASAFTVYVGSPQSRPEGTDKRIALVYALLTPFLNPIIYSLRNKEVKEAVKRVSEKIRTLLRDT

SEQ ID NO: 1141 - protein, 314 aa, Artificial Sequence
  Synthetic
MDHVNYTWTRTFILAGFTTSGALRPLAFLGTLCIYLLTLAGNLFIIVLVQADSGLSTPMYFFISVLSFLELWYVSTTVPTLLHTLLHGHSPIPSSACFVQLYVFHSLGMTECYLLGVMALDRYLAICRPLHYHALMSRQVQLWLAGATWVAGFSAALVPACLTASLPYCLKEIAHYFCDLAPLMRLACVSTRWHARVHGAVIGVATGCNFVLILGLYGGILTAVLKLPSAASRAKAFSTCSSHMTVVALFYASAFTVYVGSPQSRPEGTDKLIALVYALLTPFLNPIIYSLRNKEVKEAVKRVSEKIRTLLRDT

SEQ ID NO: 1142 - protein, 312 aa, Artificial Sequence
  Synthetic
MDHVNYTWTRTFILAGFTTSGTLQHLAVFGTLCIYLLTLAGNLFIIVLIQADSGLSTPMYFFISVLSFLELWYVSTTVPTLLHTLLHGPSPIPSSACFVQLYVFHSLGMTECYLLGVMALDRYLAICRPLHYHALMSRQVQKQLVGVTWLAGFSAALVPAGLTASLPYCLKEVAHYFCDLAPVMQLACVDTSWHARLYIAVIGMINTCNLTFILGLYGGIVRAVLKLPSAASRAKAFSTCSSHITVVTLFFGSAFIVYVGPPEIRAEGRDKLIALVYTLLTPFFNPIIYTLRNKEVKEAFKRVTQRINAVLK

SEQ ID NO: 1143 - protein, 310 aa, Artificial Sequence
  Synthetic
NLSQPSEFVLLGFSSFGELQALLYGPFLMLYLLAFMGNTIIIVMVIADTHLHTPMYFFLGNFSLLEILVTMTAVPRMLSDLLVPHKVITFTGCMVQFYFHFSLGSTSFLILTDMALDRFVAICHPLRYGTLMSRAMCVQLAGAAWAAPFLAMVPTVLSRHLDYCHGDVINHFFCDNEPLLQLSCSDTRLLEFWDFLMALTFVLSSFLVTLISYGYIVTTVLRIPSASSCQKAFSTCGSHLTLVFIGYSSTIFLYVRPGKAHSVQVRKVVALVTSVLTPFLNPFILTFCNQTVKTVLQGQMQRLKGLCKAQ

SEQ ID NO: 1144 - protein, 308 aa, Artificial Sequence
  Synthetic
MMDNHSSATEFHLLGFPGSQGLHHILFAIFFFFYLVTLMGNTVIIVIVCVDKRLQSPMYFFLSHLSTLEILVTTIIVPMMLWGLLFGRQYLSLHVSLNFSCGTMEFALLGVMAVDRYVAVCNPLRYNIIMNSSTCIWVVIVSWVFGFLSEIWPIYATFQFTFRKSNSLDHFYCDRGQLLKLSCDNTLLTEFILFLMAVFILIGSLIPTIVSYTYIISTILKIPSASGRRKAFSTFASHFTCVVIGYGSCLFLYVKPKQTQGVEYNKIVSLLVSVLTPFLNPFIFTLRNDKVKEALQDGMKRCCQLLKD

SEQ ID NO: 1145 - protein, 313 aa, Artificial Sequence
  Synthetic
MMDNLSSATEFCLLGFPGSQELHYILFAIFFFFYSVTLLGNMVIIIIVCVDKRLQSPMYFFLGNLSLLEILVTTTIVPLMLWGLLLGKQTISLNGCIAQLFLYLALGTTEFAVLGAMAVDRYVAVCNPLRYSVIMNSRTCIWVVMVSWMFGFLSEIWPVYATFQFTFCKSNLLDHFYCDRGQLLKLSCNETFLTEFILFIMAIFIIVGSLIPTIVSYTYIISTILKIPSASGRKKAFSTCASHFTFVVIGYGTCLFLYVKPKQTQAAEYNRVASLLVSVVTPFLNPFIFTLRNDKVKEALRDGVKRCCLLLRD

SEQ ID NO: 1146 - protein, 313 aa, Artificial Sequence; identical to SEQ ID NO: 1145
  Synthetic

SEQ ID NO: 1147 - protein, 313 aa, Artificial Sequence
  Synthetic
MLMNYSSATEFYLLGFPGSEELHHILFAIFFFFYLVTLMGNTVIIMIVCVDKRLQSPMYFFLGHLSALEILVTTIIVPVMLWGLLLGMQTIYLSACVVQLFLYLAVGTTEFALLGAMAVDRYVAVCNPLRYNIIMNRHTCNFVVLVSWVFGFLFQIWPVYVMFQLTYCKSNVVNNFFCDRGQLLKLSCNNTLFTEFILFLMAVFVLFGSLIPTIVSNAYIISTILKIPSSSGRRKSFSTCASHFTCVVIGYGSCLFLYVKPKQTQAADYNWVVSLMVSVVTPFLNPFIFTLRNDKVIEALRDGVKRCCQLFRN

SEQ ID NO: 1148 - protein, 313 aa, Artificial Sequence; identical to SEQ ID NO: 1147
  Synthetic

SEQ ID NO: 1149 - protein, 313 aa, Artificial Sequence
  Synthetic
MLGNHTSATEFYLVGFPGSVNLRHILFATFCFFYLVTLVGNTVIIVIVCVDKRLQSPMYFFLVHLSILEILVTTVIVPVMLWGLLLGMQSISLAGCVAQLFLQLALGTTEFSLLGAMAVDRYVAVCNPLRYSVIMNSRTCNSVVIVSWVFGFLFQIWPVYATFHLNYCKSNVVDNFFCDRGQLLKLSCNNTIFIEFILFLMAVFVLFGSLIPTIVSYTYIIATILKIPSASGRRKAFSTCASHFTCVVIGYGCCLFLYVKPKQTQAADYNRVVSLMISIVTPFLNPFIFTLRNDKVIEALRDGVKRCYHFFKS

SEQ ID NO: 1150 - protein, 316 aa, Artificial Sequence
  Synthetic
VEVRMKAWNETTVLEFVLEGFLVAQHLGKVLFLVHLLVYLASVTGNTLIIAITWSDPRLQTPMYFFLRSFSFCECCFISTVIPKLLAIFLFGDRTIHFTPCIIQAFSFLFLGSTIFFHMAVMSLDRYLAICKPLRYPAIMNPRVCFLLVFFSYVLSFILVTGVILRLSRLSFCGSNVIPHFFCDLGSLIHLSCSDTKSLESMAFGVAVVVLFTSVLAAIFAYSNILISIMRLPLAKDRQKAFSTCSSHLIVLSLMYGSCVFIYVKPKQVSRLESNREAALVNTVVTPLLNPVIYTLRNKQVHQALRDALSRVNLQK

SEQ ID NO: 1151 - protein, 316 aa, Artificial Sequence; identical to SEQ ID NO: 1150
  Synthetic

SEQ ID NO: 1152 - protein, 310 aa, Artificial Sequence
  Synthetic
MGNGTTVQEFTLEGFPAVQHLGRLLFSLNLLAYLASITGNVVIVSIICTSTRLKSPMYFFLGVFSFGESCFTSAVIPKLLAIFLLGKQTISFVACFIQTFVTLFIGAFGFFLIAVMSVDRCVAICKPLHYPTIMDLRTCILLIMACLALTFTLITWLVVTVSRLSFCGPHVIPHFFCDISPLIHLSCSDTSSAEALTFALALIILFSSLIITTIAYSNIVITIVRLPSAKERQRAFSTCSSHLIVLSLMYGSCVFIYVKPKQMSRLESNREAALVNTVVTPLLNPVIYTLRNKQVHQALRETLSRIKISG

SEQ ID NO: 1153 - protein, 313 aa, Artificial Sequence
  Synthetic
MANSTTVTEFILLGLSDACELQVLIFLGFLLTYFLILLGNFLIIFITLADRRLYTPMYYFLRNFAMLEIWFTSVIFPKMLTNIITGHKTISLLGCFLQAFLYFFLGTTEFFLLAVMSFDRYVAICNPLRYATIMSKRVCVQLVFCSWMSGLLLIIVPSSIVFQQPFCGPNIINHFFCDNFPLMELICADTSLVEFLGFVIANFSLLGTLAVTATCYGHILYTILHIPSAKERKKAFSTCSSHIIVVSLFYGSCIFMYVRSGKNGQGEDHNKVVALLNTVVTPTLNPFIYTLRNKQVKQVFREHVSKFQKFSQT

SEQ ID NO: 1154 - protein, 313 aa, Artificial Sequence
  Synthetic
MANSTTVTEFILLGLSDACELQVLIFLGFLLTYFLILLGNFLIIFITLVDRRLYTPMYYFLRNFAMLEIWFTSVIFPKMLTNIITGHKTISLLGCFLQAFLYFFLGTTEFFLLAVMSFDRYVAICNPLRYATIMSKRVCVQLVFCSWMSGLLLIIVPSSIVFQQPFCGPNIINHFFCDNFPLMELICADTSLVEFLGFVIANFSLLGTLAVTATCYGHILYTILHIPSAKERKKAFSTCSSHIIVVSLFYGSCIFMYVRSGKNGQGEDHNKVVALLNTVVTPTLNPFIYTLRNKQVKQVFREHVSKFQKFSQT

SEQ ID NO: 1155 - protein, 309 aa, Artificial Sequence
  Synthetic
MKNKTSLTEFILLGLTDVPELQVAVFTFLFLAYVFSMIGNLTILILTLLDSHLHTPMYFFLRNFSFLEISFTNIFIPRVLVSITTGNKSISFAGCFAQYFFAIFLGATEFYLLAAMSYDRYVAICKPLHYMAIMSNRVCTHLVLCSWLGGLMAIIPPITLMSQQNFCASNRLNHYFCDFEPLLELSCSDTSLIEKVVFLVASVTLVVTLMLVTLSYTFIIKTILKLPSAQQRTKAFSTCSSHMIVISLSYGSCFFMYVKPSAKVGGTFDKGVALLITSVAPLLNPFIYTLRNQQVKQAFKDTVKKLVNL

SEQ ID NO: 1156 - protein, 309 aa, Artificial Sequence; identical to SEQ ID NO: 1155
  Synthetic

SEQ ID NO: 1157 - protein, 309 aa, Artificial Sequence
  Synthetic
MKNKTSLTEFILLGLTDVPELQVAVFTFLLLAYVFSMIGNLTILVLTLLDSHLHTPMYFFLRNFSFLEISFTNIFIPRVLVSITTGNKSISFAGCFAQYFFAIFLGATEFYLLAAMSYDRYVAICKPLHYMAIMSNRVCTHLVLCSWLAGLMVIIPPITLMSQQNFCASNRLNHYFCDFEPLRKLSCSDTSLIEKVVFLVASVTLVVTLMLVTLSYTFIIKTILKLPSAQQRTKAFSTCSSHMIVISLSYGSCFFIYVKPSAKVGGTFDKGVALFITSVAPLLNPFIYTLRNQQVKQAFKDTIKKLVNL

SEQ ID NO: 1158 - protein, 309 aa, Artificial Sequence
  Synthetic
MKNKTVLTEFILLGLTDVPELQVAVFTFLFLAYLLSILGNLTILILTLLDSHLQTPMYFFLRNFSFLEISFTNIFIPRVLISITTGNKSISFAGCFTQYFFAMFLGATEFYLLAAMSYDRYVAICKPLHYTTIMSSRICIQLIFCSWLGGLMAIIPTITLMSQQDFCASNRLNHYFCDYEPLLELSCSDTSLIEKVVFLVASVTLVVTLVLVILSYAFIIKTILKLPSAQQRTKAFSTCSSHMIVISLSYGSCMFMYINPSAKEGDTFNKGVALLITSVAPLLNPFIYTLRNQQVKQPFKDMVKKLLNL

SEQ ID NO: 1159 - protein, 309 aa, Artificial Sequence; identical to SEQ ID NO: 1158
  Synthetic

SEQ ID NO: 1160 - protein, 309 aa, Artificial Sequence
  Synthetic
MKNRTMFGEFILLGLTNQPELQVMIFIFLFLTYMLSILGNLTIITLTLLDPHLQTPMYFFLRNFSFLEISFTSIFIPRFLTSMTTGNKVISFAGCLTQYFFAIFLGATEFYLLASMSYDRYVAICKPLHYLTIMSSRVCIQLVFCSWLGGFLAILPPIILMTQVDFCVSNILNHYYCDYGPLVELACSDTSLLELMVILLAVVTLMVTLVLVTLSYTYIIRTILRIPSAQQRTKAFSTCSSHMIVISLSYGSCMFMYINPSAKEGGAFNKGIAVLITSVTPLLNPFIYTLRNQQVKQAFKDSVKKIVKL

SEQ ID NO: 1161 - protein, 312 aa, Artificial Sequence
  Synthetic
MANHSSVTKFILLGLTNDINLQAVLFLFLILTYILSVMGNSAIILLTLLDHRLQTPMYFFLRNFAFLEISFTSVFVPKMLINIGTGDKTISFAGCFTQYFFAILLGATEFYLLAVMSYDRYVAICRPLHYTTIMSRRLCFQLVLSSWLSGFIVVAVPHAMTLQLPFCASNIINHYCCDYTILLHLSCSDTHFIEVIQFLLAAVTLILTLLLVILSYTHIIKTILRIPSAQQRKKAFSTCSSHMIVVSLSYGSCIFMYINPSFKDAANFNKRVAVLNTSVAPLLNPFIYTLRNKQVKIAFKDMLSKTISFFKK

SEQ ID NO: 1162 - protein, 312 aa, Artificial Sequence; identical to SEQ ID NO: 1161
  Synthetic

SEQ ID NO: 1163 - protein, 314 aa, Artificial Sequence
  Synthetic
MKNKSMELDFILLGLTDDPQLQIVVFLFLFLNYVMSLVGNLIIVLLTLLDPRLKTPMYFFLRNFSFLEIMFTTVCIPRFLTTIVTGDKTITYNNCAAQLFFILLLGVTEFYLLAAMSYDRYVAICRPLHYPIIMNSKVCHQLVLSSWVTGFLIIFPPLAMGLKLDFCDSRIIDHFMCETSPILQISCTDTHVLEMMSFVLAVVTLVVTLVLVSLSYSFIIKTIMSFPSAQQRTKAFSTCTSHMIVVSITYGSCIFMYTKPSARERVSVSKGVALLYTSIAPLLNPFIYTLRNQQVKEVFWDVLQKTLGFSKHKV

SEQ ID NO: 1164 - protein, 316 aa, Artificial Sequence
  Synthetic
MRMKNQSMELDFILLGLTDDPQLQIVVFLFLFLNYMMSLVGNLIIVLLTLLDPRLKTPMYFFLRNFSYLEIMFTTVCIPKFLTAIVTGDKTVSYNNCATQLFFYLLLGVTEFYLLAAMSYDRYVAICRPLHYPIIMNSKVCHQLVLSSWVTGFLIIFPPLAMGLKLDFCDSRIIDHFMCETSPILQISCTDTHVIEMMSFVLAVVTLVVTLVLVSLSYSFIIKTIMSFPSAQQRTKAFSTCTSHMIVVSITYGSCIFMYIKPSARERVSVSKGVALLYTSIAPLLNPFIYTLRNQQVKEVFWDILRKTLGFLKNKV

SEQ ID NO: 1165 - protein, 314 aa, Artificial Sequence
  Synthetic
MKNKSMEIEFILLGLTDDPQLQIVIFLFLFLNYTLSLMGNLIIIILTLLDPRLKTPMYFFLRNFSFLEVIFTTVCIPRFLITIVTRDKTISYNNCATQLFFILLPGVTEFYLLAAMSYDRYVAICKPLHYPIIMSSKVCYQLVLSSWVTGFLIIFPPLVMGLKLDFCASKTIDHFMCETSPILQISCTDTHVLELMSFTLAVVTLVVTLVLVILSYTCIIKTILKFSSAQQRNKAFSTCTSHMIVVSMTYGSCIFMYIKPSAKERVTVSKGVALLYTSIAPLLNPFIYTLRNQQVKEVFWDVLQKNLCFSKRPF

SEQ ID NO: 1166 - protein, 317 aa, Artificial Sequence
  Synthetic
MKNQSVEIIFILLGLTDDPQLQIPIFLFLFFNYILSLMGNLVIILLTLLDPRLKTPMYFFLRNFSFLEIAFTTACIPRFLMSILTGDRTISYNACAAQLFFFFLSLITEFYLLAAMSYDRFVAICRPLHYPIIMNSKVCHLLVLSSWVTGFFVIFPPLLLGLKLDFCASKTIDHFLCDTSPVLQLSCTDTRFIELMAFALAVMTLIITLILVILSYTLIIKTILKFPSAQQRKKAFSTCSSHMVVVSITYGSCIFMYMKTSAKERVSLNKGVAVLNTSVAPLLNPFIYTLRNQQVKDAFKQVLHRMCYSQNSELRFR

SEQ ID NO: 1167 - protein, 317 aa, Artificial Sequence
  Synthetic
MKNQSVEIIFILLGLTDDPQLQILIFLFLFFNYILSLMGNLVIILLTLLDPRLKTPMYFFLRNFSFLEIAFTTACIPRFLMSILTGDRTISYNACAAQFFFFSLLLVTEFYLLAAMSYDRYVAICRPLHYPIIMNNRMCHLLVLSCWVTGFLIILPPLVLGLKLDFCASKTIDHFLCDTSPLLQLSCTDTHFMELMAFVIALMTLVITLILVILSYTLIIKTILKFPSAQQRKKAFSTCSSHMVVVSITYGSCIFMYMKTSAKERVALNKGVSVLNTSVAPLLNPFIYTLRNQQVKDAFKQVLHRLYSHNSELRFRP

SEQ ID NO: 1168 - protein, 308 aa, Artificial Sequence
  Synthetic
MKNQSVEIVFILLGLTDDPQLQILIFLFMFFNYILSLIGNLIIIFLTLLDLRLKTPMYFFLRNFSFLEMAFTSSCIPRFLMSILTGDKTISYGSCLTQLFFFFLLLITEFYLLAAMSYDRYVAICRPLHYPIIMNSKVCHLLVLSSWVTGFLSIFPPLMLGLKLDFCASKLIDHFLCDTSPVLQLSCTDTRFIEWMAFVIAIMTLIITLILVILSYTLIIKTILKFPSAQQRKKAFSTCSSHMVVVSITYGSCIFMYIKTSAKERVSLNKGVAVLNTSVAPLLNPFIYTLRNQQVKCGASKIVSFSKQ

SEQ ID NO: 1169 - protein, 316 aa, Artificial Sequence
  Synthetic
MKNQSLEVVFVLLGLTGDPQLQILIFLFLFFNYILSLMGNLVIILLTLLDPHLKTPMYFFLRNFSFLEIAFTTVCIPRFLTSILLGEKMILYNACVAQLFFFFLLGATEFYLLAAMSYDRYVAICRPLHYPIIMNSKVCHLLVLSSWVTGFFVILPPLLLGLKLDFCASKTVDHFLCDTSVLQLSCTDTRLIELMAFALAIMTLIITLILVLFSYTLIIKTILKFPSAQQRKKAFSTCSSHMVVVSITYGSCIFMYVKTSAKERVTLNKGIAVLNTSVAPLLNPFIYTLRNQQVKEAFKNVIHRFCSFKNHETRFR

SEQ ID NO: 1170 - protein, 317 aa, Artificial Sequence
  Synthetic
MKNQSLKIEFILLGLTDDPQLQIPIFLFLFFNYILSLMGNYMIIFLTLLDPHLKTPMYFFLRNFSFLEIAFTTVCIPRFLISILSGDRTISYNACAAQLFFFFLLGSTEFYLLAAMSYDRYVAICRPLHYPIIMNSKVCHQLVLSSWVTGFLVVFPGLLLGLKLDFCASKTIDHFLCDSSPLLQLSCTDTHFIELLDFALAVMTLVITLILVILSYTLIIKTILKFPSAQQRRKAFSTCTSHMVVVSITYGSCIFMYMKTSAKERVTLNKGVAVLNTSVAPLLNPFIYTLRNQQVKEAFKHVLHRFCSLQNSETRFR

SEQ ID NO: 1171 - protein, 310 aa, Artificial Sequence
  Synthetic
MKNQSGELEFILLGLTDDPQLQILIFLFLFFNYILSMMGNLTIILLTLLDPHLKTPMYFFLRNFSFIEIAFTTVCIPRFLISILSGDRTISYNACAAQLFFVFLLGSTEFYLLAAMSYDRYVAICRPLHYPIIMNSKVCHLLVLSSWVTGFLIIFPPLLLGLKLDFCTSGAMDHFLCDPSPVLQLSCTDTQLIELMTFVLAIMTLIITLILVILSYTLIIKTILKFPSAQQRRKAFSTCSSHMVVVSITYGSCIFMYVKTSAKERVTLNKGVAVLNTSVAPLLNPFIYTLRNQQVKDAFKHMLHRFCTKQ

SEQ ID NO: 1172 - protein, 310 aa, Artificial Sequence; identical to SEQ ID NO: 1171
  Synthetic

SEQ ID NO: 1173 - protein, 316 aa, Artificial Sequence
  Synthetic
MISQREMKNHTRQIEFILLGLTDNPQLQTLIFVSLLLNYLLSMLGNLAIIALTLLDPILKTPMYFFLRNFSFLEILFTTTCIPRFLISIVTQEKTISYNGCVCQLFFYIFLGATEFFFLATMSYDRYIAICKPLHYASIMNSKVCHQLVLGSWVTGFLVIFPPLIIGLDLDFCASNVIDHFLCDVSPLLQLSCSNTNLLDLMAFILALMTLIVTLVIVIFSYAHIAKTIMKFPSVQQKKKAFSTCSSHMIVVSLTYGSCIFIYIKPSANERVTLSKGIAVLNTSVAPLLNPFIYTLRNKQVKQACGVVLRKIFSAS

SEQ ID NO: 1174 - protein, 315 aa, Artificial Sequence
  Synthetic
MISQREMKNHTRQIEFILLGLTDNPQLQTLIFVSLLLNYLLSMLGNLSIIALTLLDPILKTPMYFFLRNFSFLEILFTTTCIPRFLITIVTQEKTISYNGCFCQLFFYIFLGATEFFFLATMSYDRYIAICKPLHYASIMNSKVCHQLVLGSWVTGFLVIFPPLIIGLDLDFCASNVIDHFLCDVSPLLQLSCSDTSLLEVMAFILALMTLIVTLIIVILSYAHIVKTIIKFPSAQQKKKAFSTCSSHMIVVSLTYGSCIFIYIKPSANERVTLSKGIAVLNTSVAPLLNPFIYTLRNKQVKQACGAILRKFSAS

SEQ ID NO: 1175 - protein, 312 aa, Artificial Sequence
  Synthetic
MKNHTRQIEFILLGLTDNSQLQIVIFLFLLLNCVLSMIGNFTIIALILLDSQLKTPMYFFLRNFSFLEISFTTACIPRFLITIVTREKTISCNGCISQLFFYIFLGVTEFFLLAALSYDRYVAICKPLRYMSIMSNKVCYQLVFSSWVTGFLIIFTPLILGLNLDFCASNIIDHFICDISLILQLSCSDTHLLELIAFLLAVMTLIVTLFLVILSYSYIIKTILKFPSAQQKKKAFSTCSSHMIVVSITYGSCMFIYIKPSANERVALSKGVTVLNTSVAPLLNPFIYTLRNQQVKQAFKAVFRKIFSASDK

SEQ ID NO: 1176 - protein, 310 aa, Artificial Sequence
  Synthetic
MRNHTTVTVFILLGLTDDLQLQVVVFVLLFLTYMLSVTGNLTIITLTLLDSHLKTPMYFFLRNFSFLEISFTTVCIPKFLVSMATGDKTISYNECAAQLFFTILLGATEFFLLAAMSYDRYVAICKPLHYMTIMSSKICNLLVFVSWLSGFLIIFPPLLMGLQLDFCAANTVDHFFCDVSPILQLSCTDTHIIELMMLLSAILTLLVTLVLVSLSYTNIIRTILRIPSSQQRRKAFSTCSSHMVVVSISYGSCIFMYVKPSAKERVALNKGIALLSTSVAPMLNPFIYTLRNKQVKDAFKNMTKRWSFYQ

SEQ ID NO: 1177 - protein, 310 aa, Artificial Sequence; identical to SEQ ID NO: 1176
  Synthetic

SEQ ID NO: 1178 - protein, 312 aa, Artificial Sequence
  Synthetic
MRNHTTVANFILLGLTDDPQLQVIIFLLLFFTYMLSITGNLTIITLTLLDLHLKTPMYFFLRNFSFLEVSFTTVYIPKFLVSMATGDKTISYNDCAAQLFFTILLGATEFFLLAAMSYERYVAICKPLHYTTIMSSRVCSLLVFASWMAGFLIIFPPLLMGLQLDFCAANTVDHFFCDVSPILQLSCTDTDIIELMMLLSAILTLLVTLVLVILSYTNIIRTILKIPSSQQRKKAFSTCSSHMVVVSISYGSCIFMYVKPSAKERVSLNKGIALLSTSVAPMLNPFIYTLRNKQVKDVFKHTVKKIELFSMK

SEQ ID NO: 1179 - protein, 320 aa, Artificial Sequence
  Synthetic
LEAESIMRNSTAVTDFILLGLTDDPLWQIVVFTFLLVTYMLSVTGNLIIIILTLSDAHLMTPMYFFLRNFSLLEISFTSVCIPRFLVTIVTGDRTISYNGCVAQLFFFIFLGVTEFYLLAAMSYDRYVAICKPLHYTTIMSNRVCILLVFSSWFAGFMIIFPPIILLLQLDFCASNIIDHFICDSSPILQLSCSNTHFLELMAFSLAVVTLMVTLTLIILSYTNIIRTILRIPSTNQRKKAFSTCSSHMIVVSLSYGSCIFMYIKPSARERVTLSKGVAVLNTSVAPLLNPFIYTLRNQQVKQAFKNMIQRIFFSSKNLP

SEQ ID NO: 1180 - protein, 320 aa, Artificial Sequence; identical to SEQ ID NO: 1179
  Synthetic

SEQ ID NO: 1181 - protein, 312 aa, Artificial Sequence
  Synthetic
MRNSTAVTDFILLGLTSDPQWQVVLFIFLLVTYMLSVTGNLIIITLTLSDPHLQTPMYFFLRNFSFLEISFTSVCIPRFLVTVVTGNRTISYNGCVAQLFFFIFLGVTEFYLLAAMSYDRCMAICKPLHYTIIMSTRVCTLLVFSSWLAGFLIIFPPVMLLLQLDFCASNVIDHFICDSSPMLQLSCTNTHFLELMAFFLAVVTLMVTLTLVILSYTNIIRTILKIPSMSQRKKAFSTCSSHMIVVSISYSSCIFMYIKTSARERVTLSKGVAVLNTSVAPLLNPFIYTLRNKQVKQAFKSMVQKMIFSLNK

SEQ ID NO: 1182 - protein, 319 aa, Artificial Sequence
  Synthetic
VDKPSEMRNRTSVTYFILLGLTDDPELQVVIFFFLFLTYLLSITGNLTIITLTLLDSHLKTPMYFFLRNFSFLEISFTSVCNPRFLVSILTKDKSISYNACAAQLFFFIFLGSTEFFLLASMSYDRYVAICKPLHYTTIISNKICHQLIISSWLAGFLVVFPPLAMGLDLDFCDSNTIDHFTCDSAPLLQISCTDTSTLELMSFILALITLMTTLMLIILSYTCILRTILKFPSAKQREKAFSTCSSHMIVVSISYGSCIFMYVKTSAKAGVALTKGVAMLNTSVAPMLNPFIYTLRNQQVKQAFKDLVRKKLASKLLI

SEQ ID NO: 1183 - protein, 310 aa, Artificial Sequence
  Synthetic
MRNRTSVTYFILLGLTDDPELEVVIFFFLFLTYLLSITGNLTIITLTLLDSHLKTPMYFFLRNFSFLEISFTSVCNPRFLVSILTKDKSISYNACVAQLFFFIFLGSTEFFLLASMSYDRYVAICKPLHYTTIISNKICHQLIISSWLAGFLVIFPPLAMGLELDFCDSNIIDHFTCDSAPLLQISCTDTSTLELMSFILALITLMTTLMLIILSYICILRTILKFPSAKQREKAFSTCSSHMIVISISYGSCIFMYVKTSAKAGVALTKGVAMLNTSVAPMLNPFIYTLRNQQVKQAFKDLVRRKLASK

SEQ ID NO: 1184 - protein, 312 aa, Artificial Sequence
  Synthetic
MKNRTSVTDFILLGLTDNPQLQVVIFSFLFLTYVLSVTGNLTIISLTLLDSHLKTPMYFFLRNFSLEISFTSVCNPRFLISILTGDKSISYNACAAQLFFFIFLGSTEFFLLASMSYDCYVAICKPLHYTTIMSDRICYQLIISSWLAGFLVIFPPLAMGLQLDFCDSNVIDHFTCDSAPLLQISCTDTSTLELMSFILALFTLISTLILVILSYTYIIRTILRIPSAQQRKKAFSTCSSHVIVVSISYGSCIFMYVKTSAKEGVALTKGVAILNTSVAPMLNPFIYTLRNQQVKQAFKDVLRKISHKKKKH

SEQ ID NO: 1185 - protein, 312 aa, Artificial Sequence
  Synthetic
MPNKTSITEFILLGLTDDPELQIVIFFFLLATYLLSVSGNMTIITLTLSNVHLKTPMYFFLRNFSFLEILFTTVCIPRFLISIITGNTAISYNACMAQVFFLIFLGATEFFLLAAMSYDRYVAICKPLHYTAIINNKVCNQLVIASWSAGFLIVFPPVIMGLQLEFCDSNIIDHFTCDSSPMLQIACTDTKILELMAFFLAVFTLIVTLALVILSYTLILRTILKIPSAEQRKKAFSTCSSHMIVVSISYGSCIFMYVKTSAREGVVLSKGVAMLNTSVAPMLNPFIYTLRNQQVKQAFKDFTRKLLASKKH

SEQ ID NO: 1186 - protein, 312 aa, Artificial Sequence
  Synthetic
MPNMTSIREFILLGFTDNPELQVVIFFFMLITYLLSVSGNMIIIMLTLSNIHLKTPMYFFLRNFSFLEISFTTVFIPRFLINIATGDTTISYNASMAQVFFLILLGSTEFFLLAVMSYDRYVAICKPLHYTTIMSNKVCNWLVISSWLAGFLIIFPPVIMGLQLDFCDSSTIDHFICDSSPMLLIACTDTQFLELMAFLLAVFTLMVTLALVVLSYTLILKTILKIPSAQQRKKAFSTCSSHMIVVSVSYGSCIFMCVKTSAKEGMALSKGVAVLNTSVAPMLNPFIYTLRNQQVKQALREFTKKILSLNKQ

SEQ ID NO: 1187 - protein, 311 aa, Artificial Sequence
  Synthetic
MKNRTSVSEFILLGLTSDPKLNILIFIFLFITYILSITGNLTIITLTLIDSHLKTPMYFFLRNFSFLEISFTTVSIPRFLVSIVTGDMTISYNSCMAQVFFFILLGSTEFFLLTAMSYDRYVAICKPLHYTTIMNSRVCMQLIVSSWLAGFLIIFPPVIMGLQLDFCDSNIIDHFTCDSSPLLLISCTDTAFLELLAFFLAVFTLMVTLTLVILSYSFILRTILRIPSAEQRKKAFSTCSSHMIVVSISYGSCIFMYVKTSAKEGVALTKGIAVLNTSVAPMLNPFIYSLRNKQVKESFRNLIKKCISNKI

SEQ ID NO: 1188 - protein, 311 aa, Artificial Sequence
  Synthetic
MKNRTSVSEFILLGLTSDPKLNILIFIFLFITYILSITGNLTIITLTLIDSHLKTPMYFFLRNFSFLEISFTTVSIPRFLVSIVTGDMTISYNSCMAQVFFFILLGSTEFFLLTAMSYDRYVAICKPLHYTTIMNSRVCMQLIVSSWLAGFLIIFPPVIMGLQLDFCDSNIIDHFTCDSSPMLLISCTDTAFLELLAFFLAVFTLMVTLTLVILSYSFILRTILRIPSAEQRKKAFSTCSSHMIVVSISYGSCIFMYVKTSAKEGVALTKGIAVLNTSVAPMLNPFIYSLRNKQVKESFRNLIKKCISNKI

SEQ ID NO: 1189 - protein, 293 aa, Artificial Sequence
  Synthetic
MKNYASVKQFILLGLTDDPKLNVLIFIFLFFTYILSITGNLTIITLTLIDVHLKTPMYFFLRNFSFLEISFTTVCIPRFLVSIVTGDKTISYNSCMAQVFFFILLGSTEFFLLTAMSYDCYVAICKPLHYTTIMNSRVCIQLVISSWLAGFLIIFPPVIMGLQLDFCDSNIIDHFTCDSSPMLLISCTDTAFLEFMGFFLAIFTLMVTLTLVILSYVFILKTILRIPSAEQRKKAFSTCSSHMIVVSISYGSCIFMYVKTSAKEGVALTKGIAVLNTSVAPVLNPFTYSLRNQ

SEQ ID NO: 1190 - protein, 312 aa, Artificial Sequence
  Synthetic
MKNHTEVTVFILAGLTDDPQWKVVLFIFLLLTYLLSVTGNLTIITLTLVDTHLKTPMYFFLRNFSFLEFSYTTTCIPKLLVTMATGDKTISYGNCVTQVFFAFLFGASEFYLLAAMSYDRYVAICKPLHYMTIMNNKVCVQLVLSCWLAGFFVIFPPLVLGLNLEFCASNIVDHFYCDTTPLLQISCTDTQLLETMGFVSALVTLLLTLVMVIISYTYIAITILKIPSTEQRKKAFSTCSSHMIVISISYGSCIFMYVKPSVKQRISISKGISVLNTSVAPLLNPFIYTLRNQQVKKAFITTVHRIASSSKK

SEQ ID NO: 1191 - protein, 312 aa, Artificial Sequence; identical to SEQ ID NO: 1190
  Synthetic

SEQ ID NO: 1192 - protein, 312 aa, Artificial Sequence
  Synthetic
MKNHTRVTVFIIAGLTDDPQWKVVLFIFLLLTYLLSITGNLAIITLTLVDTHLKTPMYFFLRNFSFLEFSYTTTCIPKLLVTMATGDKTISYGNCLTQVFFAFLFGASEFYLLAAMSYDRYVAICKPLHYMTIMNNKVCVQLVLSCWLAGFFVIFPPLLLGLNLDFCASNIVDHFYCDTTPLLQLSCTDTQLLETMGFVSALVTLLLTLVMVIVSYIYIAITILKIPSASQRKKAFSTCSSHMIVISLSYGSCIFMYVKPSVKQRVSISKGISVLNTSVAPLLNPFIYTLRNQQVKKAFINTVHRIVSFSKK

SEQ ID NO: 1193 - protein, 312 aa, Artificial Sequence
  Synthetic
MKNHTRVTIFIIAGLTDDPQWKVVLFIFLLLTYLLSITGNLTIITLTLVDTHLKTPMYFFLRNFSFLEISYTTTCIPKLLVTMATGDKTISYNNCAAQVFFAFLLGASEFYLLAAMSYDRYVAICKPLHYMTIMSNKVCVQLVLSCWLISFLIIFPPLVLGLNLDFCASNIIDHFYCDTTPLLQISCTDTQLIETIAFISALVTLLLTLVMVIISYTYIAMTILKIPSTSQRKKAFSTCSSHMIVISISYGSCIFMYVKPSVKQRVSISKGISVLNTSVAPLLNPFIYTLRNQQVKRAFINTVHRIVSFSKK

SEQ ID NO: 1194 - protein, 312 aa, Artificial Sequence
  Synthetic
MSNHTETTEFILLGLSDDPKLQVVIFVFLFITYTLSITGNLTIITLTLLDSHLQTPMYFFLRNFSVLEVSFTTVTIPKFLGTIISGDKTISFNNCIAQLFFFILLGVTEFYLLAAMSYDRYVAICKPLHYLTIMSQKVCTMLVFASWLTSFLIIFPALMLLLQLDYCGSNIIDHYTCDYFPLLQLSCSDTKFLERMGFSCAVFTLMLTLVLIFLSYTYIIKTIVKIPSASQRSKAFSTCSSHMIVISISYGSCIFMYIKPSATDRASLTKGVAILNTSVAPMLNPFIYSLRNQQVKQAFMNMTRKIVFSTSK

SEQ ID NO: 1195 - protein, 312 aa, Artificial Sequence; identical to SEQ ID NO: 1194
  Synthetic

SEQ ID NO: 1196 - protein, 312 aa, Artificial Sequence
  Synthetic
MRNHTETTEFILLGLSDDPKLQVVIFVFLFITYTLSITGNLTIITLTLLDSHLQTPMYFFLRNFATLEVSFTTVCIPRFLGTIISGDKTISFNNCIAQLFFLILFGVTEFYLLAAMSYDRYIAICKPLHYLTIMSQKVCKMLVFASWLVSFLIIFPALMLLLQLDYCVSNIIDHYTCDYFPLLQLSCSDTKFLEKMGFSCAVFTLMFTLALVFWSYTYIIRTIVKIPSASQRSKAFSTCSSHMIVISISYGSCIFMYIKPSAADRASLTKGVAILNTSVAPMLNPFIYSLRNQQVRQAFMNMARKMVFFTSK

SEQ ID NO: 1197 - protein, 312 aa, Artificial Sequence
  Synthetic
MRNHTEITEFILLGLTDDPNFQVVIFVFLLITYMLSITGNLTLITITLLDSHLQTPMYFFLRNFSILEISFTTVSIPKFLGNIISGDKTISFNNCIVQLFFFILLGVTEFYLLAAMSYDRYVAICKPLHCLSIMNRRVCTLLVFTSWLVSFLIIFPALMLLLKLHYCRSNIIDHFTCDYFPLLQLACSDTKFLEVMGFSCAAFTLMFTLALIFLSYIYIIRTILRIPSTSQRTKAFSTCSSHMVVVSISYGSCIFMYIKPSAKDRVSLSKGVAILNTSVAPMMNPFIYSLRNQQVKQAFINMARKTVFFTST

SEQ ID NO: 1198 - protein, 312 aa, Artificial Sequence
  Synthetic
MKNHSVITEFLLLGISDTPELQFVIFIFLFIAYILSVTGNLTIIILTLLDSQLKTPMYFFLRNFSFLEIIFTSVSIPRFLESIITKVKTISYNNCLAQLFFFISMGVSEFFLLTAMSYDRYVAICKPLHYTLIMNQKVCTLLVLTSWLGGFLTIFPLLMLFLKLDFCASNVIDHFCCDYFPILQLSCSDTWFLETIGFYFAFITLLFTLALVILSYICIINTILRFPSASQRKKAFSTCSSHMIVISISYGSCIFMYVKPSANERASLTKGVALLNTSIAPMLNPFIYTLRNQQVKQAFKDLINKLMFNRNK

SEQ ID NO: 1199 - protein, 312 aa, Artificial Sequence; identical to SEQ ID NO: 1198
  Synthetic

SEQ ID NO: 1200 - protein, 312 aa, Artificial Sequence
  Synthetic
MKNHSVITEFVLLGISDDPEVQVVIFILLFIAYILSVTGNLTIIILTLLDSQLKTPMYFFLQNFSFLEIIFTSVSIPRFLESIITKVKTISYNNCLAQLYFFISMGVSEFFLLTAMSYDRYVAICKPLHYTLIMNQKVCTLLVLASWLAGFLTIFPPLMLVLKLDFCASNVIDHFSCDYFPILQLSCSDTRSLEMIGFYFAFITLLFTLALVILSYISIISTILRFPSASQRKKAFSTCSSHMIVISISYGSCIFMYVKPSANERASLTKGVAVLNTSIAPMLNPFIYSLRNEQVKQAFKDLINKVVLYRSK

SEQ ID NO: 1201 - protein, 312 aa, Artificial Sequence
  Synthetic
MRNHSMVTEFLLSGISDTPEVQVVIFILLFIAYILSVTGNLTIITLTLLDSQLKTPMYFFLQNFSFLEIIFTSVSVPRFLGSIITEVKTISYNNCLTQLYFFLSLGVSEFFLLTAMSYDRYVAICKPLHYVIIMNQKVCTLLVLTSWLIGFLSIFPLIMLIHKLDFCASNTIDHFCCDYFPILQLSCSDTRLLEAFGLYCASITLLFTLALVILSYICIINTILRFPSASQRKKAFSTCSSHMIVISISYGSCIFMYVKPSANERASLTKGVAVLNTSIAPMLNPFIYTLRNQQVKQAFKDFINKVMFNRNK

SEQ ID NO: 1202 - protein, 312 aa, Artificial Sequence
  Synthetic
MRNHSMVTEFVLLGISDTPEVQVVIFILLFIAYILSVTGNLTIITLTLLDSQLKTPMYFFLQNFSFLEIIFTSVSIPRFLESIITKVKTISYNNCLAQLYFFLSLGVSEFFLLTAMSYDRYVAICKPLHYVIIMNQKVCTLLVLTSWLAGFLSIFPLIMLILKLDFCALNIIDHFSCDYFPILQLSCSDTRLLEAFGFYCASITLLFTLALVILSYICIINTILRFPSASQRKKAFSTCSSHMIVISISYGSCIFMYVKPSANERASLTKGVAVLNTSIAPMLNPFIYTLRNQQVKQAFKDLINKLMFNRNK

SEQ ID NO: 1203 - protein, 312 aa, Artificial Sequence; identical to SEQ ID NO: 1202
  Synthetic

SEQ ID NO: 1204 - protein, 308 aa, Artificial Sequence
  Synthetic
MKNYTIITEFVLLGISGNRELQVVIFVFLLITYIVSITGNLTIILLTLLDSHLKTPMYYFLRNFSFLEIMFTSVSIPRFLASIITQVKTISYNNCFAQLFFFIFMGVTEFFLLTAMSYDRYVAICKPLHYTLIMNQKVCTLLVLTSWLAGFLTIFPPLMLVLKLDFCASNVIDHFCCDYFPLLQLSCSDTWLLEVIGFYVALVTLLFTLALVILSYMYIFRTILRIPSANQRKKAFSTCSSHMIVISMSYGSCIFIYVKPSANERASLTKTVAILSTSVAPMLNPFIYTLRNQQVKQAFKDLIHKVVF

SEQ ID NO: 1205 - protein, 310 aa, Artificial Sequence
  Synthetic
NHTEITEFILLGLSDDPDLQIVIFLFLLITYMLSVIGNLTIIVLTFIDTHLQTPMYFFLRNFAFLEVSFTSVCIPRFLGSIVTRNKTISYNNCAAQLFFFIFMGVCEFYILTAMSYDRYVAICKPLHYTTIMNRKLCTLFVLCAWLAGFLTVFPPLMLLLQQDYCASNVIDHFACDFFPLLQLSCSDTLFLEVIGFYVALVALLFTLALVILSYMYIIRTILRIPSTSQRKKAFSTCSSHMIVISLSYGSCIFMYANPSAKEKASLTKGVAILNTSVVPMLNPFIYTLRNQQVKQAFKGAVHKLVFSVSK

SEQ ID NO: 1206 - protein, 310 aa, Artificial Sequence
  Synthetic
NHTMVTEFVLLGLSDDPDLQIVIFLFLFITYILSVTGNLTIITLTFVDSHLQTPMYFFLRNFSFLEISFTTVCIPRFLGAIITRNKTISYNNCAAQLFFFIFMGVTEFYILTAMSYDRYVAICKPLHYTSIMNRKLCTLLVLCAWLSGFLTIFPPLMLLLQLDYCASNVIDHFACDYFPLLQLSCSDTWLLEVIGFYFALVTLLFTLALVILSYMYIIRTILRIPSASQRKKAFSTCSSHMIVISISYGSCIFMYANPSAKEKASLTKGIAILNTSVAPMLNPFIYTLRNQQVKQAFKNVVHKVVFYANQ

SEQ ID NO: 1207 - protein, 312 aa, Artificial Sequence
  Synthetic
MENRTVPTEFILLGLSDDPGLQIVIFLFLILMYILSITGNLTIITLTLVDPHLQTPMYFFLRNFSVLEITFTTVCIPRFLSTIVTRDKTISYNSCTAQLFFFIFLGITEFYLLTAMSYDRYVAICKPLHYTTIMNRRVCILLVFSAWLAGFLNIFPPVILFLQLDYCGSNVIDHFACDYFPLLQLSCSDTWLLEIIGFYSAIVILLFTLALIILSYMFIVKTILKLPSVSQRKKAFSTCSSHMIVISISYGSCIFMYANPSAKEKASLTKGVAILNTSVAPMMNPFIYTLRNQQVKQAFKDAIQKVVLFSGK

SEQ ID NO: 1208 - protein, 312 aa, Artificial Sequence
  Synthetic
MRNHSSITTFILLGLTDDPQLQVLLFIFLFLTYMLSVTGNLIIIILTLVDPHLKTPMYFFLRNFSFLEVSFTTVCIPRFLYSISSGDNTITYNACASQIFFVILFGATEFFLLAAMSYDRYVAICKPLHYMTIMNPRVCILLVITCWVSGLMIITPPLILGLQLDFCDSNAIDHFSCDAGPLLKISCSDTWVIEQMVILVAVFALIITLICVILSYTYIIRTILRFPSAQQRKKAFSTCSSHMIVVSITYGSCIFIYIKPSAKDEVAINKGVSVLTTSVAPLLNPFIYTLRNKQVKQAFSDSVKRITFISKS

SEQ ID NO: 1209 - protein, 312 aa, Artificial Sequence; identical to SEQ ID NO: 1208
  Synthetic

SEQ ID NO: 1210 - protein, 312 aa, Artificial Sequence
  Synthetic
MKNHTVIRTFILLGLTGDPHLQVLLFIFLFLTYMLSVTGNLTIITLTLVDHHLKTPMYFFLRNFSFLEVSFTTVCIPRFLYNISMGDNTITYNACASQIFFVILFGATEFFLLAAMSYDRYVAICKPLHYVVIMNNRVCTLLVLCCWVAGLMIIVPPLSLGLQLEFCDSNAIDHFSCDAGPLLKISCSDTWVIEQMVILMAVFALIITLVCVILSYLYIVRTILKFPSVQQRKKAFSTCSSHMIVVSIAYGSCIFIYIKPSAKDEVAINKGVSVLTTSVAPLLNPFIYTLRNKQVKQAFSDSIKRIAFLSKK

SEQ ID NO: 1211 - protein, 312 aa, Artificial Sequence
  Synthetic
MTNHTAITTFILLGLTDDPKLQVLIFLFLFLTYILSVTGNLTIITLTLLDPHLKTPMYFFLRNFSFLEVSFTTVCIPRFLYMMATGDNTVTYNACATQLFFVVLFGATEFFLLAAMSYDRYVAICKPLHYTTIMNNRVCTVLVLSCWCAGLLIILPPLGLGLQLEFCDSNVIDHFGCDASPILQITCSDTAFIEKIVLAFAILTLIITLVCVVLSYTYIIKTILKFPSAQQRKKAFSTCSSHMIVVSITYGSCIFIYIKPSAKEGVAINKVVSVLTTSVAPLLNPFIYTLRNKQVKEAFKDTVKRIVFLTKK

SEQ ID NO: 1212 - protein, 317 aa, Artificial Sequence
  Synthetic
MRNHTVMTTFILLGLTDDPGLQLLFFVILFLTYILSIMGNLTIIILTLMDSHLNTPMYFFLRNFSFLEISFTTVCIPRFLYSISTGVNTITYNACASQIFFVGLFGATEFFLLAAMSYDRYVAICKPLHYMTIMDNKVCAILVLCCWTSGLLVIIIPLGMILQLEFCDSNTIDHFFCDASPLIKISCSDTWFLEQTVIVCAVLTFIITLIVVILSYIYIIRTILRFPSAHQRKKAFSTCSSHMIVVSIMYGSCIFIYVTPSAKEQVDINKGVSMLNTSVAPLLNPFIYTLRNKQVKQAFNDTVKKTSYTNKNMLDLS

SEQ ID NO: 1213 - protein, 312 aa, Artificial Sequence
  Synthetic
MRNHTSITTFILLGLTDDPQLQVLLFIFLFITYLLSVTGNLTIITLTTVDPYLKTPMYFFLQNFSFLEISFTSACVPRFLYSISTGDRTITYNACATQLFFTDLFGVTEFFLLAIMSYDRYVAICKPLHYMTIMNNKVCRIMVISCWMAAFMIILPPLSLGFHLEFCDSNIIDHFGCDANPILKISCSDTWLIEQMVIGSAVLTFIITLLCVVFSYMYIIRTVLKFPSAQQKRKAFSTCSSHMIVVSITYGSCIFIYVKPSAKEAVTINKGVSVLISSISPMLNPFIYTLRNKQVKQASQDLIKKIAFLLKK

SEQ ID NO: 1214 - protein, 312 aa, Artificial Sequence; identical to SEQ ID NO: 1213
  Synthetic

SEQ ID NO: 1215 - protein, 312 aa, Artificial Sequence
  Synthetic
MRKHTAITTFILLGLTEDPQLQVLLFMFLFITYMLSVTGKLTIIALTMLDPHLKTPMYFFLQNLSFLEISFTATCVPRFLYSISTGNKIITYNACVIQLFFADLFGVTEFFLLATMSYDRYVAICKPLHYMAIMSNKVCKTMVICCWMAALMIILPPLSLGFHLEFCDSNVINHFGCDALPILKIPCSDTSLIEQMVVASAVLTFIITLVCVVLSYTYIIRTILKFPSVQQKKKAFSTCSSHITVVSITYGSCIFIYIKPSAKEEVNINKGVSVLISSISPMLNSFIYTLRNEQVKQAFHDSLKKIAFRLKK

SEQ ID NO: 1216 - protein, 311 aa, Artificial Sequence
  Synthetic
MRNHTITTFILLGLTDDPQLKTLIFIFLFLSYVLSMTGNLTIISLTFIDPHLKTAMYFFLQNFSFLEISFTTACIPRYLYNISTGDKTITYNNCAIQIFCVDLFGVTEFFLLAIMSYDRYVAICKPLHYSTIMSSRICTRLILCCWAAGLFVILPPLSLGLKLEFCDSNVIDHFVCDANPLLKISCTETWLIEQIVIVCAVFTFIMTLVCVSLSYIYIIRTILRFPSAQQRKKAFSTCSSHMIVVSITYGSCIFIYIKPSAKDSVTINKGVTILTTSIAPMLNPFIYTLRNKQVKQAFNDSVKRIVLFFQK

SEQ ID NO: 1217 - protein, 311 aa, Artificial Sequence
  Synthetic
MRNHTVTTFILLGLTDDPQLKTLIFIFLFLSYMLSMTGNLTIISLTFIDSHLKTAMYFFLQNFSFLEISFTTACIPRYLYNISTGDKTITYNNCVIQIFCTDLFGVTEFFLLAIMSYDRYVAICKPLHYSTIMSSRICARLILSCWAAGLFVILPPLSLGLKLKFCDSNVIDHFVCDANPLLKISCTETWLIEQIVIVSAVLTFITTLLCVSLSYIYIIRTILRFPSAQQRKKAFSTCSSHMIVVSITYGSCIFIYIKPSAKDSVTINKGVMVLTTSIAPMLNPFIYTLRNKQVKQAFNDSVKRIALFFQK

SEQ ID NO: 1218 - protein, 311 aa, Artificial Sequence; identical to SEQ ID NO: 1217
  Synthetic

SEQ ID NO: 1219 - protein, 316 aa, Artificial Sequence
  Synthetic
MKNNTITTFILLGLTDDPQLQIPIFVFLFFAYMLSITGNLTIISLTILDSHLKTPMYFFLQNFSILEISFTSACIPRYLYNIATGDRSITYNVCVIQVFFTDVFGVIEFFLLAIMSYDRYVAICKPLHYVTIMSSKVCQTLVLCCWSAGLLIILPPLTLFLNLRFCDSNVIDYFFCDASPILKISCSDTWLIEQLVIVCAVLTFILTLVCVTLSYVHIIKTILRFPSAQQRKKAFSTCSSHMIVVSITYGSCIFIYINPSAKESVAINKGVAVLMTSIAPMLNPFIYTLRNKQVRQAFSDSFKKIAIISMKKENVQ

SEQ ID NO: 1220 - protein, 311 aa, Artificial Sequence
  Synthetic
MRNHTVTTFILLGLTEDPQIQSLLLIFLLLTYLLNITGNLTIILLTLIDPHLKTPMYFFLQNFSFLEILFTSACIPRYLYNLATGDKTITYGACASQAFFTDLFGVTEFFLLATMSYDRYVAICKPLHYTTIMSTACRRLLLCCWVAGVIIILPPFSLSQNLQFCDSNIIDSFLCDVSPFLKISCSDTWVIEQMVIGCAVLTFITTLFCVVLSYVYIIKTILKFPSAQQRKKAFSTCSSHMIVVSITYGSCIFIYVKPSAKDSVAINKGVIVLTTSIAPMLNPFIYTLRNKQVKQAFNDSIKKIALECQNG

SEQ ID NO: 1221 - protein, 311 aa, Artificial Sequence
  Synthetic
MRNHTVTTFILLGLTDDQQLQVLIFIILFFTYSLSISGNLAIISLILVDPHLKTAMYYFLKNFAVLEISFTSASIPRYLYNIATGDKMITYNACVAQVFFTDLFGVTEFFLLAAMSYDRYVAICRPLHYLTIMSTTVCRRLVFCSWVAGLFILIPPLSLGLNLQFCDSNIIDHFICDASPLLKISCSDTWFMEQTVLICAVLTLIITLVCVVLSYVNIIKTVLRFPSAQQKKKAFSTCSSHMIVVSITYGSCIFIYIKPSAKDEVAINKGVTVLTTSIAPMLNPFIYTLRNRQVKQAFWDSIKRIIAFSKQ

SEQ ID NO: 1222 - protein, 311 aa, Artificial Sequence
  Synthetic
MRNHTVTTFILLGLTDDQQLQVLIFIILFFTYSLSISGNLAIISLILVDPHLKTAMYYFLKNFAVLEISFTSASIPRYLYNIATGDKMITYNACVAQVFFTDLFGVTEFFLLAAMSYDRYVAICRPLHYLTIMSTTVCRRLVFCSWVAGLFILIPPLSLGLNLQFCDSNIIDHFVCDASPLLKISCSDTWFMEQTVLICAVLTLIITLVCVVLSYVNIIKTVLRFPSAQQKKKAFSTCSSHMIVVSITYGSCIFIYIKPSAKDEVAINKGVMILTTSIAPMLNPFIYTLRNRQVKQAFWDSIKRTIAFSKQ

SEQ ID NO: 1223 - protein, 311 aa, Artificial Sequence
  Synthetic
MKNRTVTTFILLGLTDDIRLQTLLFIFLLFSYMLSLSGNLTIITLTLIDPHLKTPMYIFLKNFSFLEISLTTACIPRFLYSLSSGDKSIAYAACISQLLFIDIFAVTEFFLLAIMSYDRYVAICKPLHYMTIMNSRVCKNFIFFCWVAALIIVLPPISLGLGLEFCDSDIVDHFCCDAAPLLKISCSDTWLIEQMVIAGAVLTFIITFVCVVLSYGYIIKTILRFPSAKQRKKAFSTCSSHMIVVSITYGSCIFIYVKPSSKDNVAINKGISLIIVSISPMLNPFIYALRNKQVKQAFNYSIKKVAFLSKM

SEQ ID NO: 1224 - protein, 311 aa, Artificial Sequence
  Synthetic
MRNRTVTTFILLGLTDDIRLQILLFIFLLSSYMLSLSGNLTIITLTLIDPHLKTPMYIFLKNFSFLEISLTTACIPRFLYSISSGDKSITYIACASQLLFIDLFAVTEFFLLAIMSYDRYVAICKPLHYMTIMNSRVCKNFIFSCWVAALIIILPPIGLGLGLEFCDSDIIDHFCCDAAPLLKISCSDTWLIEQMVIAGAVLTFIITFVCVVLSYVYIIKTILRFPSAKQRKKAFSTCSSHMIVVSITYGSCIFIYVKPSSKDDVAINKGISLLIISISPMMNPFIYALRNKQVKQAFNYSIKKIAFLSKM

SEQ ID NO: 1225 - protein, 311 aa, Artificial Sequence; identical to SEQ ID NO: 1224
  Synthetic

SEQ ID NO: 1226 - protein, 311 aa, Artificial Sequence
  Synthetic
MRNHTLVTTFILLGLTEDPKWQIVIFLFLFMTYVLSITGNLTIILLTLLDSNLKTPMYFFLQKFSFLEISLTSTCIPRFLVSIVTMDKTISVEACFTQLFAAFIFGIAQFFLLAVMSYDRYVAICRPLHYTTIMNNRVCTLLFVSCCLIAVFAICPGVIVSLSLEFCDTIIEHFFCDYSPILKLSCNDTRFMQLLNFIFAIFILLMTLALVMFSYGKIISTILRFPSAQQQKKAFSTCSSHMIVVSISYGSCIFMYIKPSAEERIYLNKGIAILTLALAPVLNPFIYTLRNKQVKEALKDIIKKCTSATSK

SEQ ID NO: 1227 - protein, 311 aa, Artificial Sequence; identical to SEQ ID NO: 1226
  Synthetic

SEQ ID NO: 1228 - protein, 316 aa, Artificial Sequence
  Synthetic
LHWTMEKSNNSTLFILLGFSQNKNIEVLCFVLFLFCYIAIWMGNLLIMISITCTQLIHQPMYFFLNYLSLSDLCYTSTVTPKLMVDLLAERKTISYNNCMIQLFTTHFFGGIEIFILTGMAYDRYVAICKPLHYTIIMSRQKCNTIIIVCCTGGFIHSASQFLLTIFVPFCGPNEIDHYFCDVYPLLKLACSNIHMIGLLVIANSGLIALVTFVVLLLSYVFILYTIRAYSAERRSKALATCSSHVIVVVLFFAPALFIYIRPVTTFSEDKVFALFYTIIAPMFNPLIYTLRNTEMKNAMRKVWCCQILLKRNQLF

SEQ ID NO: 1229 - protein, 312 aa, Artificial Sequence
  Synthetic
MEKSNNSTLFILLGFSQNKNIEVLCFVLFLFCYIAIWMGNLLIMISITCTQLIHQPMYFFLNYLSLSDLCYTSTVTPKLMVDLLAERKTISYNNCMIQLFTTHFFGGIEIFILTGMAYDRYVAICKPLHYTIIMSRQKCNTIIIVCCTGGFIHSASQFLLTIFVPFCGPNEIDHYFCDVYPLLKLACSNIHMIGLLVIANSGLIALVTFVVLLLSYVFILYTIRAYSAERRSKALATCSSHVIVVVLFFAPALFIYIRPVTTFSEDKVFALFYTIIAPMFNPLIYTLRNTEMKNAMRKVWCCQILLKRNQLF

SEQ ID NO: 1230 - protein, 309 aa, Artificial Sequence
  Synthetic
MEKSSNITVFILLGLSQNKNTEILCFVFFLFCYIAIWMGNVLIMVSITCTHLVEQPMYFFLNYLSLSDLCYTSTVTPKLMTDLLAERKVISYNNCMIQLFTTHLFGGIEIFILTGMAYDRYVAICRPLHYTIIMSRHRCNLIIMTCCTGGFVHSASQLLLTIFLPFCGPNEIDHYFCDVYPLLKLACSNTHIIGLLVIANSGLIALVTFVVLMTSYFFILYTIRAYSAESRSKALSTCSSHLTVVVLFFAPALFIYIRPATTFPEDKVFALFYTIIAPMFNPLIYTLRNTEMKNALRKVWGHQGLLKGR

SEQ ID NO: 1231 - protein, 309 aa, Artificial Sequence
  Synthetic
MGNVTVFILLGLSDNQNIEVLCFVLFLFCYIAIWMGNVLIMVSITCTQLMDQPMYFFLHYLSLCDLCYTSTVTPKLLTDLLAERKIISYNNCMTQLFVLHFLGAIEIFILTAMAYDRYVAICRPLHYTVIMSRQRCNEILAACCTGGFVHSASQSLLIACLSFCHHNEIDHYFCDVYPLLKLACTDTHRIGLFVIVDSGLIALVTFVVLMVSYFLIAYTISVYPAESRSKALSTCSSHITIVVLFFVPVFFIYIRPNITFPEDKVFALFYTIIAPMFNPLIYTLRNIEMKRAIKKMWYHQIPSYKKQIP

SEQ ID NO: 1232 - protein, 309 aa, Artificial Sequence
  Synthetic
MGNVTVFILLGLSDNQNIEVLCFVLFLFCYIAIWMGNVLIMVSITCTQLMDQPMYFFLHYLSLCDLCYTSTVTPKLLTDLLAERKIISYNNCMTQLFVLHFLGAIEIFILTAMAYDRYVAICRPLHYTVIMSRQRCNEILAACCTGGFVHSASQSLLIACLSFCHHNEIDHYFCDVYPLLKLACTDTHRIGLFVIVDSGLIALVTFVVLMVSYFLIAYTISVYPAESRSKALSTCSSHITIVVLFFVPVFFIYIRPNITFPEDKVFALFYTIIAPMFNPLIYTLRNLEMKRAIKKMWYHQIPSYKKQIP

SEQ ID NO: 1233 - protein, 307 aa, Artificial Sequence
  Synthetic
MESTNNITEFILLGLSQNKKIKALCFLMFLFCYIAILGGNMIILISITCSQLIEQPMYFFLNYLALSDLCYTSTVTPKFLTDLLVERNKISYTSCMAQLFTMHFFGGIEILILTVMAYDRYVAICKPLHYSIIMSRGRCHAMVTACCAGAFIHSFLQSLLAISLPFCGHNEMDHYFCDIYPLLTLSCTNTHRVGLLVVANSGMMGLVTFVVLMWSYYFILYTIRAYPAESRSKALSTCSSHVTVVIFFFVPVLFIYIRPATTYPEDKVFALFYTILAPMFNPLIYTLRNTEMKNALRKVWCHKLFFI

SEQ ID NO: 1234 - protein, 312 aa, Artificial Sequence
  Synthetic
MDYRTNITEFILLGLSQTKEIEVICFVLFLLCYIAILFGNLLIMISVTWSHLINQPMYFFLSYLALSDLCYTSTVTPKLIINLVTTKKSISYNGCMTQLFTMHFFGGIEVFILTGMAYDRYVAICKPLHYTILMSRQKCDAVIAASCAGGFLHSFGQFLLAVFLPYCGPNEIDHYFCDVYPLLKLACTDTRKIGFLVIANSGLMGLVTFVVLLISYGVILYTVRSYSAENRRKALSTCSSHITVVVLFFAPLLFIYIRPATTLPEDKVFALFYTIIAPMLNPLIYTLRNKEMKNAIKRLCYEVTVFHHHTVS

SEQ ID NO: 1235 - protein, 311 aa, Artificial Sequence
  Synthetic
MECKRNISEFLLMGLSSKRNIEVFCFLFFSFCYLAILCGNLLILISIRCSSLFNQPMYYFLSHLSSMDIFYTSCVTPKLIGDLLVRRKTISYTNCMLQVFAMHFFGMIEILILTAMAFDRCVAICKPLHYMVIMSRSRCHILIWASWVGGAAHSLSQFCLLICLPFCGPNEIDHYYCDIFPLLKVACTDTTITGVLVVANSGLIALVTFVVLFGSYVVILFTLRNYSAEGRHKALSTCASHITVVILFFGPSIFAYLRPPTTFPEDKIFALFYTIIAPMFNPLIYTLRNTEMKKAMKKVWCQNMFSEEKHS

SEQ ID NO: 1236 - protein, 311 aa, Artificial Sequence
  Synthetic
MECKRNVSEFLLMGLSSKQNTEVFCFIFFLFCYFTILSWNLLILFSIRCSSLFNQPMYYFLSHLASMDICYTSCVTPKLIGDLLAERKTISYTNCMLQVFAMHFFGMIEILILTVMAFDRCVAICKPLYYMVIMSRNRCHVFIWASWVGGVAHSFPQVMMLVCLPFCGPNEIDHYYCDVFPLLKVACTDTYIIGVLMVANSGMVAFVIFVLLFGSYVVILFTLRNYSAEGRRKALSTCGSHISVVILFFGPSIFVYLRPPTTFPEDKIFALFYTIIAPMFNPLIYTLRNTEMKSAIKKVWCQVTFLGEKHN

SEQ ID NO: 1237 - protein, 308 aa, Artificial Sequence
  Synthetic
MGYGNLTEFILLGLFHNEDVKAICAVLFLLCYLAILCGNLVVLLTIKGSQLSEQPMYFFLSYLSFMDVCFTSTVAPKFIIGLLVQCNTISYNGCIAQMFYAHFFGATEIFILVVMAYDRYVAICRPLYYMITMSRQVCYILVIGSVFGAFIHSLVHVLVIIRLPFCGSNEIDHYFCDIFPLLKLACTDTRLLVIVIITTTGVMSILTFVALVISYIIILSILRTRSSESRRKALSTCGSHITVVFMFFLPLIFTYVPMGDSVGDDKVFALFYTMIAPLFNPLIYTLRNTDMKNAMRKVWCQDKLFEGK

SEQ ID NO: 1238 - protein, 307 aa, Artificial Sequence
  Synthetic
MGFGNLTEFIFLGLFHNENVKEMCAVLFLLCYLAILCGNLVVLITIRGSHLSQPMYYFLTYLSFMDVCFTSTVAPKLIIDLFVQCNTISYNGCIAQMFYAHFFGATEIFILVAMAYDRYVAICRPLYYMITMSRQVCYMLVIASAIGAFIHSLVHVFIIIRLPFCGTNEIDHYFCDIFPLLKLACTDTRLMVIVIITTTGVLSILTFLALVISYIIILSILRTRSSEGRRKALSTCGSHITVVFMFFLPLIFTYVPVGDSVGDDKVFALFYTMIAPLFNPLIYTLRNTDMKNAMRKVWCQDKLFEGK

SEQ ID NO: 1239 - protein, 320 aa, Artificial Sequence
  Synthetic
WIHLEFMENHKNVTEFIFMGLWQNRQIELLFFLLFLLCYLAILMGNSVILFTITCSHLIEQPMYYFLCHLSLMDLCYTSTVIPRLIRDLATTRKNISYNECMTQLFTSHLLAGVEIFILVSMALDRYVAIVKPLHYMVIMSRKRCDMLIVTAWILGFWHSIALLLMVLSLPFCGPNHINHYLCDIKPLLKLVCKDVHVVSILAIANSGMVLFAIFIVLLASYILILYSLRTRSSAGKRKALSTCSSHIMVVVLFFGPCIYIYILPAGSENKDKEISVFYTVIAPMLNPLIYTLRNSEMKSAMHKVWSRLSLRVEVSERIL

SEQ ID NO: 1240 - protein, 320 aa, Artificial Sequence
  Synthetic
WIHLEFMENHKNVTEFIFMGLWQNRQIELLFFFLFLLCYLAVLMGNSVILLTITCSHLIEQPMYYFLCHLSLMDLCYTSTVIPRLIRDLAATRKNISYNECMTQLFTAHLLAGVEIFILVSMALDRYVAIVKPLHYMVIMSRKRCDMLIVTAWILGFWHSIALLLMVLSLPFCGPNHINHYLCDIKPLLKLVCKDLHVVSILTIANSGMVVVAIFIVLLVSYILILYSLRTRSSAGKRKALSTCSSHIMVVVLFFGPCIYTYVLPVGSENKDKEISVFYTVIAPMLNPLIYTLRNSEMKSAMHKVWSRLSLRVEVSERIL

SEQ ID NO: 1241 - protein, 320 aa, Artificial Sequence
  Synthetic
WIQLEFMENHKNITEFIFMGLWENRQIELLFFFLFLLCYLAVLMGNSVIFLTITCSHLIEQPMYYFLCHLSLMDLCYPSTVIPRLIRDLAATRKNISYNECMTQLFTAHLLAGVEIFILVSMALDRYVAIVKPLHYMVIMSRKRCDMLIVTAWILGFWHSIALLLMVLSLPFCGPNHINHYFCDIKPLLKLVCKDVHVVSILAIVNSGMVLFAIFIVLLASYILILYSLRTRSSAGKRKALSTCSSHIMVVVLFFGPCIYTYVLPAGSENKDKEISVFYTVIAPILNPVIYTLRNSEMKSAMHKVWSRNLGLKYVKPSCN

SEQ ID NO: 1242 - protein, 308 aa, Artificial Sequence
  Synthetic
MANKNNITELIFTGLFQDPEVQKVCFVLFLPVYLATLLGNSLIVVAVSISKTLHSPMYFFLSSLSLVEICYSSTIVPKFITDLLVKVKTISLKGCLAQIFFSHFLGVAEILLLVVMAYDRYVAICKPLHYMNIMSRQVCHMLVGGSWLGGLIHSIIQIIITIPLPFCGPNVIDHYFCDLQPLFKLACTDTFMEGVVVMANSGLISIISLFILVSSYAIILISLRKHSAEGRRKALSTCASHITVVILFFGPATFLYLRPSSSFTEDKLVAVFYTVITPMLNPIIYTLRNAEVKNAMKKLWGKRNPETE

SEQ ID NO: 1243 - protein, 304 aa, Artificial Sequence
  Synthetic
MARENNVTELIITGLFQDPNVQKVCFVLFLPVYLATVLGNGLIVAMVIVSKSLHSPMYIFLSSLSLVEICYSSTVVPKFITDLLAKVKTISLKGCLAQIFFFHFLGVAEIFLLVVMAYDRYVAICKPLHYMNIMSRQVCHVLVAVSWLGGFLHSIIQVLISIQLPFCGPNVIDHYFCDLQPLFKLACTDTFVESVIVMANSGLIALCSFLVLVSSYVIILVNLRKHSAEGRRKALSTCASHITVVVLFFGPAIFLYMRPSSTFTEDKLVAVFYTVITPMLNPIIYTLRNAEVKNAVRKLWGKRI

SEQ ID NO: 1244 - protein, 304 aa, Artificial Sequence; identical to SEQ ID NO: 1243
  Synthetic

SEQ ID NO: 1245 - protein, 305 aa, Artificial Sequence
  Synthetic
MVHENNVTELIFTGLFQDPEVQKVCFVLFLPVYLATLLGNGLIFVTVSISKTLHSPMYFFLSSLSLVEICYSSTVAPKFITDLLAKVKTISLKGCLTQIFFFHFFGVVEIILLVMMAYDRYVAICKPLHYMIIMSRQVCHMLVAGSWLGGLIHSIIQIIITIPLPFCGPNVIDHYFCDLHPLLKLACSDTFMERFIVMANSGLFSIISLFILVSSYAVILISLRKRSAEGRRKALSTCASHITVVILYFGPGAFIYMRPSSAFTEDKLVSVFYTVITPMLNPIVYTLRNTEMKNAIRMFWSQKDK

SEQ ID NO: 1246 - protein, 309 aa, Artificial Sequence
  Synthetic
MASTSNVTELIFTGLFQDPAVQSVCFVVFLPVYLATVVGNGLIVLTVSISKSLDSPMYFFLSCLSLVEISYSSTIAPKFIIDLLAKIKTISLEGCLTQIFFFHFFGVAEILLIVVMAYDCYVAICKPLHYMNIISRQLCHLLVAGSWLGGFCHSIIQILVIIQLPFCGPNVIDHYFCDLQPLFKLACTDTFMEGVIVLANSGLFSVFSFLILVSSYIVILVNLRNHSAEGRHKALSTCASHITVVILFFGPAIFLYMRPSSTFTEDKLVAVFYTVITPMLNPIIYTLRNAEVKIAIRRLWSKKENPGRE

SEQ ID NO: 1247 - protein, 315 aa, Artificial Sequence
  Synthetic
MASRTYSVNNVTEFIFLGLSQNPEVEKVCFVVFSFFYMVILLGNLLIMLTVCSGNLFKFPMYFFLNFLSFVDICYSSVTAPKMIIDLLVKKKTISYVGCMLQLFVVHFFGCTEIFILTVMAYDRYVAICKPLHYMTIMDRERCNKMLLGTWIGGFLHSIIQVALVVQLPFCGPNEIDHYFCDVHPVLKLACTDTYIVGIFVTANSGTIALGSFVILLISYTVILMSLRKQSSEGRRKALSTCGSHIAVVIIFFGPCTFMYMRPDTTFSEDKMVATFYTIITPMLNPLIYTLRNAEVKNAMRKLWARKFSWETTGK

SEQ ID NO: 1248 - protein, 315 aa, Artificial Sequence
  Synthetic
MASRTYSVNNVTEFIFLGLSQNPEVEKVCFVVFSFFYMVILLGNLLIMLTVCSGNLFKFPMYFFLNFLSFVDICYSSVTAPKMIIDLLVKKKTISYVGCMLQLFVVHFFGCTEIFILTVMAYDRYVAICKPLHYMTMMDRERCNKMLLGTWIGGFLHSIIQVALVVQLPFCGPNEIDHYFCDVHPVLKLACTDTYIVGIFVTANSGTIALGSFVILLISYTVILMSLRKQSSEGRRKALSTCGSHIAVVIIFFGPCTFMYMRPDTTFSEDKMVAIFYTIITPMLNPLIYTLRNAEVKNAMRKLWARKFSWETTGK

SEQ ID NO: 1249 - protein, 315 aa, Artificial Sequence
  Synthetic
MASRTYSVNNVTEFIFWGLSQNPEVEEVCFVVFSFFYMVILLGNLLIMLTVCSGNLFKSPMYFFLNFLSFVDICYSSVTAPKMIVDLLVKKKTISYVGCMLQLFGVHFFGCTEIFILTVMAYDRYVAICKPLHYMTIMDRERCNKMLLGTWISGFLHSIIQVALVVQLPFCGPNEIDHYFCDVHPVLKLACTDTYIVGVVVTANSGTIALGSFVILLISYTVILISLRKQSSEGRRKALSTCGSHIAVVIIFFGPCTFMYMRPDTTFSEDKMVAIFYTIITPMLNPLIYTLRNAEVKNAMRKLWARKVSWETTGK

SEQ ID NO: 1250 - protein, 311 aa, Artificial Sequence
  Synthetic
MEKINNVTEFIFWGLSQSPEIEKVCFVVFSFFYIIILLGNLLIMLTVCLSNLFKSPMYFFLSFLSFVDICYSSVTAPKMIVDLLAKDKTISYVGCMLQLFGVHFFGCTEIFILTVMAYDRYVAICKPLHYMTIMNRETCNKMLLGTWVGGFLHSIIQVALVVQLPFCGPNEIDHYFCDVHPVLKLACTETYIVGVVVTANSGTIALGSFVILLISYSIILVSLRKQSAEGRRKALSTCGSHIAMVVIFFGPCTFMYMRPDTTFSEDKMVAVFYTIITPMLNPLIYTLRNAEVKNAMKKLWGRNVFLEAKGK

SEQ ID NO: 1251 - protein, 311 aa, Artificial Sequence
  Synthetic
MEKINNVTEFIFWGLSQSPEIEKVCFVVFSFFYIIILLGNLLIMLTVCLSNLFKSPMYFFLSFLSFVDICYSSVTAPKMIVDLLAKDKTISYVGCMLQLLGVHFFGCTEIFILTVMAYDRYVAICKPLHYMTIMNRETCNKMLLGTWVGGFLHSIIQVALVVQLPFCGPNEIDHYFCDVHPVLKLACTETYIVGVVVTANSGTIALGSFVILLISYSIILVSLRKQSAEGRRKALSTCGSHIAMVVIFFGPCTFMYMRPDTTFSEDKMVAVFYTIITPMLNPLIYTLRNAEVKNAMKKLWGRNVFLEAKGK

SEQ ID NO: 1252 - protein, 305 aa, Artificial Sequence
  Synthetic
MVATNNVTEIIFVGFSQNWSEQRVISVMFLLMYTAVVLGNGLIVVTILASKVLTSPMYFFLSYLSFVEICYCSVMAPKLIFDSFIKRKVISLKGCLTQMFSLHFFGGTEAFLLMVMAYDRYVAICKPLHYMAIMNQRMCGLLVRIAWGGGLLHSVGQTFLIFQLPFCGPNIMDHYFCDVHPVLELACADTFFISLLIITNGGSISVVSFFVLMASYLIILHFLRSHNLEGQHKALSTCASHVTVVDLFFIPCSLVYIRPCVTLPADKIVAVFYTVVTPLLNPVIYSFRNAEVKNAMRRFIGGKVI

SEQ ID NO: 1253 - protein, 309 aa, Artificial Sequence
  Synthetic
MAAASNVTEIIFLGLSQYQHVQKVIFVMFLLMYTAIVLGNGLIVVTIVASKGLSSPMYFFLGYLSFVEVCYCSVTAPKLIFDSLLQRKAISLQGCITQIFFLHFFGGTEIFLLTVMAYDRYVAICKPLHYVTIMNRRVCGLLVGAAWSGGLLHSAGQTFLIFQLPFCGPNIINHYFCDVHPVLKLACSDTFLISLLVIINGGSISVISFAVLLASYVVILNSLRSHTAEGRHKALSTCASHLAVVGLFFIPCSFVYMRPCITFPVDKVVAVFYTVVTPLLNPIIYSFRNTEVKNAMKRLVGRKVTWEEK

SEQ ID NO: 1254 - protein, 309 aa, Artificial Sequence
  Synthetic
MADIHNVTEFLFLGLSSNKEVEIVCFVIFLLLYMAIVLGNLLMVVTVVASRSLGSPMYFFLGYLSFVEICYSSTTAPKLILDLLAEKKSISVWGCMTQLFFMHFFGGAEIFLLTVMAYDRYVAICKPLHYTSIMNRNVCAVLVGTAWIGGFVHSFAQILLIFPLPFCGPNIIDHYFCDLLPLLKLACSDTFLIGLLIVANAGTLSVISFVVLLASYVVILFHLRTQSAEGRRKALSTCGSHVTVVILFFGPCVFIYLRPSDTLPVDKMIAVFYTVITPLLNPLIYSLRNAKVKKTMKSLWFRTMKVDEK

SEQ ID NO: 1255 - protein, 309 aa, Artificial Sequence; identical to SEQ ID NO: 1254
  Synthetic

SEQ ID NO: 1256 - protein, 309 aa, Artificial Sequence
  Synthetic
MADIHNVTEFIFLGLSSNQEVQKVCFVIFLLLYMAIVLGNLLMVVTVVASRSLGSPMYFFLGYLSFVEICYSSTTAPKLILDLLAEKKSISVWGCMTQLFFMHFFGGTEIFLLTMMAYDRYVAICKPLHYTSIMNQSVCAVLMGTAWIGGFVHSFAQILLIFPLPFCGPNIIDHYFCDVLPVLKLACSDTFLIGLLIVVNGGTLSVISFVVLLASYGVILFHLRTQSAEGRRKALSTCGSHVTVVILFFGPCVFIYLRPSDTLPVDKMIAVFYTVITPLLNPLIYSLRNAEVKKAMKSLWFRTMKVDEK

SEQ ID NO: 1257 - protein, 309 aa, Artificial Sequence
  Synthetic
MADIHNVTEFFFLGLSSNQEVQRVCFVIFLFLYMAIVLGNLLMVVIVAVSRNLGSPMYFFLSSLSFVEICYSSTTAPKLIVDLLAEKKSISVWGCMAQLFFMHFFGGIEMFLLMMMAYDRYVAICKPLHYTSIMNRQVCTVLVGMAWMGGFVHSLAQVLLIFRLPFCGPNIIDHYFCDVLPVLKLVCSDTFLIGLLIVVNGGTLTVISFVVLLSSYAVILFHLRTQSAEGRRKALSTCGSHVTVVVIFFAPCVFIYLRPTATLPIDKMVTVFYTVITPLLNPIIYSLRNAEVKKVIKILCTRATKVDKK

SEQ ID NO: 1258 - protein, 303 aa, Artificial Sequence
  Synthetic
MTEFIFLVLSPNQEVQRVCFVIFLFLYTAIVLGNFLIVLTVMTSRSLGSPMYFFLSYLSFMEICYSSATAPKLISDLLAERKVISWWGCMAQLFFLHFFGGTEIFLLTVMAYDHYVAICKPLSYTTIMNWQVCTVLVGIAWVGGFMHSFAQILLIFHLLFCGPNVINHYFCDLVPLLKLACSDTFLIGLLIVANGGTLSVISFGVLLASYMVILLHLRTWSSEGWCKALSTCGSHFAVVILFFGPCVFNSLRPSTTLPIDKMVAVFYTVITAILNPVIYSLRNAEMRKAMKRLWIRTLRLNEK

SEQ ID NO: 1259 - protein, 303 aa, Artificial Sequence; identical to SEQ ID NO: 1258
  Synthetic

SEQ ID NO: 1260 - protein, 307 aa, Artificial Sequence
  Synthetic
MQQNSTVTEFILLGLTQDPLKQKMVFIIFLVFYMGTVVGNTLIIVTIKFSRTLGGPMYFFLFYLSFADSCFSTSTAPRLIVDALSKKNIISYNECMTQVFALHLFGCMEVFVLIFMAVDRYVAICKPLHYPVIMRRQVCVILIIVAWIGSFLHSTTQIVLALRLPFCGPNLIDHYCCDLQPLLELACMDTHMINLLLVFNSGAICSSSFLIFIISYFVILYSLRNHSAEGRKKALSTCTSHIIVVVLSFGPCIFIYARPPTTFSMDKMVTVFFTIGSPFLNPIIYTLRNAEVKNAMKKLWHVKIMTE

SEQ ID NO: 1261 - protein, 307 aa, Artificial Sequence
  Synthetic
MQQNSTVTEFILLGLTQDPLKQKMVFIIFLVFYMGTVVGNTLIIVTIKFSRTLGGPMYFFLFYLSFADSCFSTSTAPRLIVDALSKKNIISYNECMTQVFALHLFGCMEVFVLIFMAVDRYVAICKPLHYPVIMRRQVCVILIIVAWIGSFLHSTTQIVLALRLPFCGPNLIDHYCCDLQPLLELACMDTHMINLLLVFNSGAICSSSFLILIISYFVILYSLRNHSAEGRKKALSTCTSHIIVVVLSFGPCIFIYARPPTTFSMDKMVTVFFTIGSPFLNPIIYTLRNAEVKNAMKKLWHVKIMTE

SEQ ID NO: 1262 - protein, 307 aa, Artificial Sequence
  Synthetic
MQQNSTVTEFILLGLTQDPLKQKMVFIIFLVFYLGTVVGNTLIIVTIKFSRTLGSPMYFFLFYLSFSDSCFSTSTAPRLIVDALSKKNIISYNECMTQVFALHLFGCMDVFILIFMAVDRYVAICKPLRYSVIMRRQVCVILIIVAWIGSFLHSTTQIVLALRLPFCGPNLIDHYCCDLQPLLKLACMDTYMINLLLVFNSGAICSSSFVILIISYFVILHSLRNHSAEGRKKALSTCTSHIIVVILSFVPCIFIYARPPTTFPMDKMVTVFYTIGTPFLNPIIYTLRNAEVKNAMKKLWHVKFIMK

SEQ ID NO: 1263 - protein, 307 aa, Artificial Sequence
  Synthetic
MQHNSTVTKFILLGLTQDPLKQKMVFIIFLVFYLGTVVGNTLIIMTIKFSRTLGSPMYFFLFYLSFADSCFSTSTAPRLIVDALSKKNIISYNECMTQVFALHLFGCMEIFVLILMAVDRYVAICKPLRYPVIMSRQVCVILIILAWIGSFIHSTAQIVLALRLPFCGPNLIDHYCCDLQPLLKLACMDTYMINLLLVSNSGAICSSSFVILIISYFVILHSLRNHSAEGRKKALSTCTSHIIVVILFFGPCIFIYARPPTTFSMDKMVAVFYTIGTPFLNPIIYTLRNAEVKNAMKKLWHVKIMTE

SEQ ID NO: 1264 - protein, 310 aa, Artificial Sequence
  Synthetic
MQQNNSVPEFILLGLTQDPLRQKIVFVIFLIFYMGTVVGNMLIIVTIKSSRTLGSPMYFFLFYLSFADSCFSTSTAPRLIVDALSEKKIITYNECMTQVFALHLFGCMEIFVLILMAVDRYVAICKPLRYPTIMSQQVCIILIVLAWIGSLIHSTAQIILALRLPFCGPYLIDHYCCDLQPLLKLACMDTYMINLLLVSNSGAICSSSFMILIISYIVILHSLRNHSAKGKKKALSACTSHIIVVILFFGPCIFIYTRPPTTFPMDKMVAVFYTIGTPFLNPLIYTLRNAEVKNAMRKLWHGKIISENKG

SEQ ID NO: 1265 - protein, 310 aa, Artificial Sequence
  Synthetic
MQQNNSVTEFILLGLTQDPLRQKIVFVIFLIFYMGTVVGNMLIIVTIKSSRTLGSPMYFFLFYLSFADSCFSTSTAPRLIVDALSEKKIITYNECMTQVFALHLFGCMEIFVLILMAVDRYVAICKPLRYPTIMSQQVCIILIVLAWIGSLIHSTAQIILALRLPFCGPYLIDHYCCDLQPLLKLACMDTYMINLLLVSNSGAICSSSFMILIISYIVILHSLRNHSAKGKKKALSACTSHIIVVILFFGPCIFIYTRPPTTFPMDKMVAVFYTIGPPFLNPLIYTLRNAEVKNAMRKLWHGKIISENKG

SEQ ID NO: 1266 - protein, 303 aa, Artificial Sequence
  Synthetic
MHNYSVTEFILFGLTQDPEKQKAIFGVFLILYLMTLIGNFLIVMTIKMSQTLGSPMYFFLFYLSFADACFSTTTAPRLIIDALSQKKIITYNECMTQVFAAHFFGCMEIFVLILMAIDRYVAICKPLRYTTIMSQRICGILVILAWVGSCIHSSAQIFLALRLPFCGPNVIDHYFCDLQPLLKLACMDTYVINLLVVSNSGAICMVSFTLLLISYIFILYSLRNHSVEGRRKALSTCTSHFIVVVIFFGPCIFIYTRPPTTFPIDKMVSVFYTIGTPLLNPLIYTLRNAEVKIAMKKLWCGKV

SEQ ID NO: 1267 - protein, 303 aa, Artificial Sequence
  Synthetic
MHNNSMTEFILLGLTQDPEQQKAIFGVFLILYLMTLIGNFLIMVTIKMSQTLGSPMYVFLFYLSFADACFSTTTAPRLIVNALSQKKIISYNECMTQVFAAHFFGCMEIFVLILMAIDRYVAICKPLRYTTIMNQNICDILVIIAWIGSCIHSSAQIFLALRLPFCGPNVIDHYFCDLQPLMKLACMDTYVINLLVVSNSGAICMISFIVLFISYIFILYCLRNHSAEGRRKALSTCTSHFIVVVIFFGPCIFIYTRPLITLPIDKMVSVFYTIGTPLLNPLIYTLRNSEVKYAMKKLWCGKV

SEQ ID NO: 1268 - protein, 301 aa, Artificial Sequence
  Synthetic
NHTMTEFILFGLTQDPEQQKAIFGVFLILYLMTLMGNFLIMVTIKMSQTLGSPMYFFLFYLSFADACFSTTTAPRLIADALLQKKIITYNECMTQVFAVHFFGCMEIFVLILMAFDRYVAICKPLRYTAIMSQHICGVLVILAWIGSCIHSSAQIFLALRLPFCGPNVIDHYFCDLQPLLKLACMDTYVINLLVVSNSGAICTVSFIVLLISYIVILYSLRSHSAEGRRKALSTCTSHIIVVILFFGPCIFIYTWPPTTFPIDKMVSLFYTIGTPVLNPLIYTLRNAEVKHAMKKLWGNKV

SEQ ID NO: 1269 - protein, 310 aa, Artificial Sequence
  Synthetic
MWLNNNVTEFILLGLTQDPFRKKILFVVFLLFYMGTLLGNLLIIATIKTSQTLGSPMYFFLFYLSLSDTCFSTTIAPRTIVDSLLKEASISFTECIIQVFTFHFFGCLEIFILILMAVDRYVAICKPLHYMTIMSRRVCGVLVAIAWVGSCVHSLVQIFLALSLPFCGPNEIDHYFCDLQPLLKLACSDTYLINLLLVSNSGAICTVSFLMLMVSYVIILRSLRNHSAEGRRKALSTCISHIIVVILFFGPCIFIYTRPATTFPMDKMIAIFYSIGTPLLNPLIYTLRNAEVKNAMKKLWRKKVVSDDRK

SEQ ID NO: 1270 - protein, 310 aa, Artificial Sequence
  Synthetic
MQLNINVTEVILLGLTQDPSRKNIVFAIFLLFYMGTLLGNLLIIVTVKTSQALGSPMYFFLFYLSLSDTCFSTTVAPRTIVDSLQKEASISFTECIIQIFTFHFFGCLEIFILILMAVDRYVAICKPLHYMTIMSRRVCGVLVAIAWMGSCVHSLVQIFLALSLPFCGPNVIDHYFCDLQPLLKLACSDTYLINLLLVSNSGAICTVSFLVLMFSYVIILHSLRNHSAEGRRKALSTCISHIIVVILFFGPCIFIYTRPATTFPMDKMISIFYSIGTPLLNPLIYTLRNAEVKNAMKKLWRKKIVSDDKK

SEQ ID NO: 1271 - protein, 308 aa, Artificial Sequence
  Synthetic
MQLNINVTEFILLGLTQDPSRKNIVFAIFLFFYMGTLLGNFLIIVTIKTSPALGSPMYFFLFYLSLSDTCFSTTVAPRTIVDSLLKEASISFNECIIQVFTFHLFGSLEIFILILMAVDRYVAICKPLHYMTIMNRQVCGMLVATVCVGSCIHSSVQIILALSLPFCGPNEIDHYFCDLQPLLKLACSDTYVINLLLVSNSGTLCTVSFLMLMVSYIIILYSLRNHSAEGRRKALFTCVSHIIVVILFFVPCIFIYTRPATTFPMDKMISVFYTICTPFLNPLIYTLRNAEVKNAMRKLWSKKISDDI

SEQ ID NO: 1272 - protein, 310 aa, Artificial Sequence
  Synthetic
MQLNNNVTEFILLGLTQDPFWKKIVFVIFLRLYLGTLLGNLLIIISVKASQALKNPMFFFLFYLSLSDTCLSTSIAPRMIVDALLKKTTISFSECMIQVFSSHVFGCLEIFILILTAVDRYVDICKPLHYMTIISQWVCGVLMAVAWVGSCVHSLVQIFLALSLPFCGPNVINHCFCDLQPLLKQACSETYVVNLLLVSNSGAICAVSYVMLIFSYVIFLHSLRNHSAEVIKKALSTCVSHIIVVILFFGPCIFMYTCPATVFPMDKMIAVFYTVGTSFLNPVIYTLKNTEVKSAMRKLWSKKLITDDKR

SEQ ID NO: 1273 - protein, 314 aa, Artificial Sequence
  Synthetic
MKNKNNVTEFILLGLTQNPEGQKVLFVTFLLIYMVTIMGNLLIIVTIMASQSLGSPMYFFLASLSFIDTVYSTAFAPKMIVDLLSEKKTISFQGCMAQLFMDHLFAGAEVILLVVMAYDRYMAICKPLHELITMNRRVCVLMLLAAWIGGFLHSLVQFLFIYQLPFCGPNVIDNFLCDLYPLLKLACTNTYVTGLSMIANGGAICAVTFFTILLSYGVILHSLKTQSLEGKRKAFYTCASHVTVVILFFVPCIFLYARPNSTFPIDKSMTVVLTFITPMLNPLIYTLKNAEMKSAMRKLWSKKVSLAGKWLYHS

SEQ ID NO: 1274 - protein, 314 aa, Artificial Sequence [sequence omitted]

SEQ ID NO: 1275 - protein, 314 aa, Artificial Sequence
  Synthetic
MENRNNVTEFILLGLTQNPEGQKVLFVTFLLIYIVTVMGNLLIMVTIMASHSLGSPMYFFLAYLSFIDTVYSTSIAPKMIIDLLYETKTISFRACMTQVFIDHLFAGAEVILLVVMAYDRYVAICKPLHYLTIMNRRVCVLMLLGAWIGGFLHSLIQFIFIYQLPFCGPNIIDSFVCDMYPLLKLACTNTYLIGLCMIANGGAICTVTFLILLVSYGVILHSLKAHSLEGKRKALYTCASHITVVVLFFVPCIFLYARPTSTFPIDKSVTVVLTFITPMLNPLIYTLRNAEMKNAMKRLWSKKSSSIVSGLYHS

SEQ ID NO: 1276 - protein, 305 aa, Artificial Sequence
  Synthetic
MEQRNNVTEFVLLGLTQSPEGQKILFVVFLVIYVVTMAGNLLIVVTVVVSPSLDAPMYFFLGYLSFMDAVYSTTVTPNMIIDLLYEKKTISFKACMSQLFIGHLFGGAEILLLVVMAYDRYVAICKPLHYLTIMNQRVCVLLLLLAWFGGFLHAVVQLLFVYNLPFCGPNIIDHFICDMYPLLKLACTDTYVIGLTVVANDGAICVVIFMLLVISYGVILHSLKNLSQEGRRKALSTCGSHITVVVLFFVPCIFMYVRPPSTLPIDKSLTVFYTVVTPMLNPLIYTLRNAEMKNAMRKLWASKGK

SEQ ID NO: 1277 - protein, 314 aa, Artificial Sequence
  Synthetic
MGQNNNVTEFILLGLTQDPAGQKVLFIMFLLIYIVTIVGNLLIVGTVIASPSLGSPMYFFLAFLSLMDAVYSTAILPKLLTDLLCDKKTISFTACLVQLFVEHLFGGSEVFILVVMAYDRYVAICKPLHYLTIMNRQVCILLLVVSWAGGFAHALLQVISVYLLPFCGPNVIDHFACDMYPLLGLACTDTYFLGLTVVGNNGAMSIVVFILLLVSYGIILNSLKTHSQEGRRKALSTCSSHIMVVVLFFVPCIFMYVRPVSNFPIDKYITVFYTVFTPMLNPLIYTLRNMEIKNCMAKLWCKMFTKDIKRDSHH

SEQ ID NO: 1278 - protein, 312 aa, Artificial Sequence
  Synthetic
MGQKNNVTEFILLGLTQDPAGQKALFVMFLLIYIVTIVGNLLIVGTVIASPSLGSPMYFFLAFLSLMDAVYSTAILPKLLTDLLCDKKTISFTACLVQLFVEHLFGGSEVFILVVMAYDRYVAICKPLHYLTIMNRQVCILLLVVSWAGGFAHALLQVISVYILPFCGPNVIDHFGCDMYPLLGLACTDTYFLGLTVVGNNGAMSIVVFVLLLVSYGIILNSLKTHSQEGRRKALSTCSSHIMVVVCFFVPCIFMYVRPVSNFPIDKYITVFYTIFTPMLNPLIYTLRNMEIKICMAKLWSKTKDIKRDSHH

SEQ ID NO: 1279 - protein, 307 aa, Artificial Sequence
  Synthetic
MGQNNNVTEFILLGLTQDPAGQKVLFVMFLLIYIVKIVGNLLIVGTVIASPSLGSPMYFFLAFLSLMDAVYSTAILPKLLTDLLCDKKTISFTACLVQLFVEHLFGGSEVFILVVMAYDHYVAICKPLHYLTIMKRQVCILLVVVSWAGGFAHALLQVISVYLLPFCGPNVIDHFACDIYPLLGLACTDTYFLGLTVVSSYGAMSIVAFILLLVSYGIILNSLKTDSQEGRRKALSTCSSHIMVVVLFFVPCIFMYVRPISNFPIDKYITVFYTIFTPMLNPLIYTLRNMEIKNCMAKLWSKMFTKA

SEQ ID NO: 1280 - protein, 314 aa, Artificial Sequence
  Synthetic
MGETNNVTEFVLLGLTQDPTGQKALFVMFLLMYIVTIVGNLLIVGTVIASPSLNSPMYFFLAFLSLMDAVYSTAILPKLLKDLVCDKKTISFTACLVQLFVEHLFGGAEVFLLVVMAYDRYVAICKPLHYLTVMNQQVCISLLVVAWVGGFAHALVQVLSVYKLPFCGPNVIDHFGCDMYPLLALVCTDTYFIGLTVVANNGAMCMVVFVLLLFSYGIILSSLKTHSQEGRRKALSTCSSHIMVVVLFFVPCIFMYVRPVSNFPIDKSISVFYTAITPMLNPLIYTLRNSEIKNSMGKLWSKMISIDRVRIFAY

SEQ ID NO: 1281 - protein, 314 aa, Artificial Sequence
  Synthetic
MGKSNNVTEFILLGLTQDPAGRKALFVMFLLIYIVTMVGNLLIVETVISSPSLDSPMYFFLASLSLMDAVYSTAFSPKLIMDLLCNRRTISVSACIGQLFVEHLFGGAEVFLLVFMAYDRYVAICKPLHYMTIMNRQVCILLLVAACAGGFGHSLVQVIVVCYLPFCGPNTIDHFICDMYPLLGLACTDTYLIGLTVVANGGAICMTVFILLLVSYGIILNSLKSHSEEGRRKALSTCSSHIIVVVLFFVPCIFMYVRPVSNFPIDKSLTVVYTVITPMLNPLIYTLRNAEMKNSMKKLWCERLTMERLRMFPH

SEQ ID NO: 1282 - protein, 314 aa, Artificial Sequence
  Synthetic
MGQRNNVTEFILLGLTQDPAGQKALFVMFLLIYIVTMVGNLLIVATVIASPSLGSPMYFFLAYLSIMDAVYSTSTSPKLIMDLLSDKKTISFSACMGQLFIEHLFGGAEVFLLVVMAYDRYVAICKPLHYLTIMNRQICILLLVIAWVGGFVHSVIQLAFVSTLPFCGPNVIDHFICDMYPLLTLACSDTYFIGLTVVANGGAICMVILILLLISYVFILNSLKNYSQEGRRKALSTCSSHITVVVLFFVPCIFIYVRPVSNFPIDKSISVVFTVITPMLNPLIYTLRNSEMKIAMQKLWCKTATTGRVRVHSP

SEQ ID NO: 1283 - protein, 314 aa, Artificial Sequence
  Synthetic
MGKNNNVTEFILLGLTQDPVGQKALFVLFLLMYIVTMAGNLIIVVTIIASPSLSSPMYFFLAYLSLMDAIYSTAISPKLIMDLLCNKKTISFRACMGQLFVEHLFGATEIFLLVAMAYDRYVAICKPLHYLTIMNHRVCILLVMATWVGGFAHSMAQVLFVYDLPFCGPNVIDHFACDMYPLLVLVCSDTYFLGLTVIANDGAICMVVFVILLASYGIILNSLKTHSQEGRRKALSTCSSHIMVVILFFVPCIFMYVRPVSNFPVDKSVTIFYTVVTPMLNPLIYTLRNSEIKHSMLKLWSKILHSDRLRKSCC

SEQ ID NO: 1284 - protein, 314 aa, Artificial Sequence
  Synthetic
MGQRSNVTEFILLGLTQDHVGQRALFVMFLLIYIVTIVGNLLIVGTVIASPSLGTPMYFFLAYLSLLDAVYSTAISPKLMVDLLCDRKTISFSACMTQLFLEHLLGGAEVFLLMVMAYDRYVAICKPLHYLIIMNRRVCFLLLVVSWAGGLAHSVAQLLFVYNLPFCGPNVIDHFICDMYPLLGLACTDTHIIGLTVVANGGAICMLVFIILIISYGIILRSLKTHSQEGRQKALSTCSSHIMVVVLFFVPCIFMYVRPVHNFPIDKSITVFYTIVTPILNPLIYALRNSEMKRSMENLLYKVFPRDKITMSFH

SEQ ID NO: 1285 - protein, 314 aa, Artificial Sequence; identical to SEQ ID NO: 1284
  Synthetic

SEQ ID NO: 1286 - protein, 312 aa, Artificial Sequence
  Synthetic
MGERNNVTEFVLLGLTQDPAGQKVLFVMFLLIYIVTMVGNLLIVLMVIASPSLGSPMYFFLACLSFLDIVYSTSISPKLIMDLLCDEKSISFTACMSQLFIEHLFGGTEIVILVAMAYDRYVAICKPLHYLTIMNRKVCIILLGFSWVGGFTHSMIQILFVFNLPFCGPNIIDHFMCDMSPLLGLVCTDTYFIGLTLIANGGAMCIVVFILLIVSYGIILKSLKNYSQEGRRKALSTCSSHIMVVTLFFVPCIFMYARPVYNFSSDKYITVFYTVFTPMLNPLIYTLRNSEMKNSMQKLWCTTMDRIRLSCY

SEQ ID NO: 1287 - protein, 307 aa, Artificial Sequence
  Synthetic
MGEKSNITEFILLGLTQDPAGRKILFFIFLLIYIVTMVGNLLIVVTVITSPSLGSPMYFFLASLSLLDALFSTAISPKLIVDLFCDQKTISFTACMSQLFIEHLFGGVDIVILVAMAYDRYVAICKPLHYLAIMNRRVCITLLIIAWTGGFTHSLIQIVFVYNLPFCGPNVIDHFICDMSPLLVLACTDTYFIGLTVIANGGAMCIVIFTLLLGSYGIILRSLKTHSQEGRRKALSTCSSHILVVILFFVPCIFMYARPVYNFPIDKCITVFYTIITPMLNPLIYTLRNSEMKTCMKKLWCKILSAD

SEQ ID NO: 1288 - protein, 314 aa, Artificial Sequence
  Synthetic
MGQSNNVTEFVLLGFTQDPAGQKALFVMFSLMYIATMVGNLLIVGTVIASPSLGSPMYFFLASLSLMDAVYSTAISPKLIVDLLREKKTISFRACISQLFIEHLFGGVDIVILVAMAYDRYVAICKPLHYLIIMNRRVCILFLVMAWVGGFVHSLFQVLAVYNLPFCGPNIIDHFGCDIYPLLLLACTDTYFLGLTIIANGGAMCIVIFILLLLSYAIILRSLQNHSKEGRRKALSTCISHITVVFLFFVPCIFMYVRPVSSFPIDKSITVIYTIVTPMLNPLIYTLRNSEMKNSMEKLLQKSPNRIKLSSCCS

SEQ ID NO: 1289 - protein, 314 aa, Artificial Sequence
  Synthetic
MGQSNNVTEFVLLGFTQDPAGQKALSVMFSLIYIVTMVGNLLIVGTVIASPSLGSPMYFFLASLSLMDAIYSTAITPKLIVDLLCEKKTISFRACISQLFIDHLFGGVDIVILLAMAYDRYVAICKPLHYLIIMNRRVCILFLVMAWAGGLAHALFQVLAVYNFPFCGPNIIDHFGCDIYPLLLLACTDTYFLGLSIIGNNGAMCIVIFTLLLLSYGIILRFLKNHSQEGRRKALSTCGSHITVVFLFFVPCIFMYVRPVSSFPIDKFITVIYTIVTPMLNPLIYTLRNSEMKNSMEKLLQKSPSRIRLSSCCL

SEQ ID NO: 1290 - protein, 314 aa, Artificial Sequence
  Synthetic
MGQSNNVTEFVLLGFTQDPAGQKALFVMFSLMYIATMVGNLLIVGTVIASPSLGSPMYFFLASLSLMDAVYSTAISPKLIVDLLREKKTISFRACISQLFIEHLFGGVDIVILVAMAYDRYVAICKPLHYLIIMNRRVCILFLVMAWAGGFAHALFQVLAVYNLPFCGPNIIDHFGCDIYPLLLLACTDTYFIGLSVIGNNGAMCIVIFILLLLSYGIILRSLKNHSQEGRRKALSTCGSHITVVFLFFVPCIFMYVRPVSSFPIDKSITVIYTIVTPMLNPLIYTLRNSEMKISMEKLLQKSPCRIRLSSCCL

SEQ ID NO: 1291 - protein, 305 aa, Artificial Sequence
  Synthetic
MGQSYNVTEFIFVDLTQDPAGKKALFVLFSLTYIVTMLGNLLIAVTVIASPSLNSPMYFFLACLSVLDAFYCNTISPNLIIGLLKDKNNISFRACMLQLFVEHLFGGVEVFLLVFMAYDRYVAICKPLHYLTIMNQRVCILLLLVAGVGGILHSLIQVLTVYKLPFCGPNVIDHFMCDMNPLLGLACTDTYFLGITVIANGGVICVGIFTFLLVSYGIILNSLKTHSQEGRRKALSTCSSHIMVVVCFFAPCIFIYARPVSNFSIDKYIAVFYTVVSPMLNPLIYTLRNSEMKNSIKKLWCKTLA

SEQ ID NO: 1292 - protein, 306 aa, Artificial Sequence
  Synthetic
MGQNHNVTEFIFVGLSQDPAGQKVLFVLFSLTYIVTMFGNLLIALTVIASPSLNSPMYFFLACLSVLDALYCNTISPNLIIDLLYNKKNISFRACMLQLFVEHLFGGVEVFLLVFMAYDRYVAICKPLHYLTIMNQRVCILLLLIAGVGGILHSLIQVLTVYKLPFCGPNVIDHFMCDMNQLLGLACTDTYFLGITVMANGGVICVGIFTFLLVSYGIILNSLKTHSREGRHKALFTCSSHIMVVVCFFAPCSFIYARPVSNFPVDKYIAVFYTVVSPMLNPLIYTLRNSEMKNSIKKLWCKTLTT

SEQ ID NO: 1293 - protein, 306 aa, Artificial Sequence; identical to SEQ ID NO: 1292
  Synthetic

SEQ ID NO: 1294 - protein, 313 aa, Artificial Sequence
  Synthetic
MRQNNNITEFVLLGFSQDPGVQKALFVMFLLTYLVTVVGNLLIVVDIIASPSLGSPMYFFLACLSFIDAAYSTTISPKLIVGLFCDKKTISFQGCMGQLFIDHFFGGAEVFLLVVMACDRYVAICKPLHYLTIMNRQVCFLLLVVAMIGGFVHSAFQIVVYSLPFCGPNVIVHFSCDMHPLLELACTDTYFIGLTVVVNSGAICMVIFNLLLISYGVILSSLKTYSQEKRGKALSTCSSGSTVVVLFFVPCIFIYVRPVSNFPTDKFMTVFYTIITHMLSPLIYTLRNSEMRNAIEKLLGKTIFIIGGVSVLM

SEQ ID NO: 1295 - protein, 314 aa, Artificial Sequence
  Synthetic
MRPSSNVTEFVLLGLTQDPDVKKTLFVMFLLIYIVTMVGNLLIWVTTIGSPSLGSLMYFFLAYLSLMDAIYSTAMSPKLMIDLLCDKIAISLSACMGQLFIEHLLGGAEVFLLVVMAYDRYVAISKPLHYLNIMNRLVCILLLVVAMIGGFVHSVVQIVFLYSLPICGPNVIDHSVCDMYPLLELLCLDTYFIGLTVVANGGIICMVIFTFLLISCGVILNFLKTYSQEERHKALPTCISHIIVVALVFVPCIFMYVRPVSNFPFDKLMTVFYSIITLMLNPLIYSLRQSEMKNAMKNLWCESIVRKRVSPTLN

SEQ ID NO: 1296 - protein, 299 aa, Artificial Sequence
  Synthetic
MEPRKNVTDFVLLGFTQNPKEQKVLFVMFLLFYILTMVGNLLIVVTVTVSETLGSPMSFFLAGLTFIDIIYSSSISPRLISDLFFGNNSISFQSFMAQLFIEHLFGGSEVFLLLVMAYDRYVAICKPLHYLVIMRQWVCVLLLVVSWVGGFLQSVFQLSIIYGLPFCGPNVIDHFFCDMYPLLKLACTDTHVIGLLVVANGGLSCTIAFLLLLISYGVILHSLKKLSQKGRQKAHSTCSSHITVVVFFFVPCIFMCARPARTFSIDKSVSVFYTVITPMLNPLIYTLRNSEMTSAMKKL

SEQ ID NO: 1297 - protein, 299 aa, Artificial Sequence; identical to SEQ ID NO: 1296
  Synthetic

SEQ ID NO: 1298 - protein, 309 aa, Artificial Sequence
  Synthetic
MEPRKNVTDFVLLGFTQNPKEQKVLFVMFLLFYILTMVGNLLIVVTVTVSETLGSPMYFFLAGLSFIDIIYSSSISPRLISGLFFGNNSISFQSCMAQLFIEHIFGGSEVFLLLVMAYDCYVAICKPLHYLVIMRQWVCVVLLVVSWVGGFLHSVFQLSIIYGLPFCGPNVIDHFFCDMYPLLKLVCTDTHAIGLLVVANGGLACTIVFLLLLISYGVILHSLKNLSQKGRQKALSTCSSHMTVVVFFFVPCIFMYARPARTFPIDKSVSVFYTVITPMLNPLIYTLRNSEMTSAMKKLWRRDLISSST

SEQ ID NO: 1299 - protein, 306 aa, Artificial Sequence
  Synthetic
MEPRNNVTYFVLLGLSENPKVQKGLFVLFLLSYVLTMVGNLLIVMTVTTSNSLGSPMYFFLASLSFVDIIYSSAISPKLISDLFFGQNTISFKFCMTQLFTEHFFGGSEVFLLLVMAYDRYVAICKPLHYSTIMKQWVCVVLLILSWIGGFLHSVIQLSTIYGLPFCGPNIIDHFMCDMYPLLKLVCIDTYVIGLLVMANGGLICTVVFILLLISYGVILYSLKNLNQEGRWKALSTCGSHITVVVSFFVPCIFMYARPAKTFPIDKMLSVFYTVITPMMNPLIYTLRNSEMTNAMKKLWRRKIIS

SEQ ID NO: 1300 - protein, 306 aa, Artificial Sequence; identical to SEQ ID NO: 1299
  Synthetic

SEQ ID NO: 1301 - protein, 302 aa, Artificial Sequence
  Synthetic
MDIPQNITEFFMLGLSQNSEVQRVLFVVFLLIYVVTVCGNMLIVVTITSSPTLASPVYFFLANLSFIDTFYSSSMAPKLIADSLYEGRTISYECCMAQLFGAHFLGGVEIILLTVMAYDRYVAICKPLHNTTIMTRHLCAMLVGVAWLGGFLHSLVQLLLVLWLPFCGPNVINHFACDLYPLLEVACTNTYVIGLLVVANSGLICLLNFLMLAASYIVILYSLRSHSADGRCKALSTCGAHFIVVALFFVPCIFTYVHPFSTLPIDKNMALFYGILTPMLNPLIYTLRNEEVKNAMRKLFTW

SEQ ID NO: 1302 - protein, 308 aa, Artificial Sequence
  Synthetic
SVTLESMDIPQNITEFFMLGLSQNSEVQRVLFVVFLLIYVVTVCGNMLIVVTITSSPTLASPVYFFLANLSFIDTFYSSSMAPKLIADSLYEGRTISYECCMAQLFGAHFLGGVEIILLTVMAYDRYVAICKPLHNTTIMTRHLCAMLVGVAWLGGFLHSLVQLLLVLWLPFCGPNVINHFACDLYPLLEVACTNTYVIGLLVVANSGLICLLNFLMLAASYIVILYSLRSHSADGRCKALSTCGAHFIVVALFFVPCIFTYVHPFSTLPIDKNMALFYGILTPMLNPLIYTLRNEEVKNAMRKLFTG

SEQ ID NO: 1303 - protein, 308 aa, Artificial Sequence
  Synthetic
MEIPHNITEFFMLGLSQRPEIQRLLFVVFLVIYAVTVCGNMLIVVTVTFSSSLASPMYFFLSNLSFIDTCYSSSLAPKLIADSLYEGTTLSYEGCMAQLFGAHFLGGVEIILLTVMAYDRYVAICKPLHYTTTMTRHLCVVLVAVAWLGGFLHSLVQILLIFQLPFCGPNVINHFVCDLYPLLELACTNTYVIGLLVVANSGVICLLNFLMLAASYIVILHSLRSHSAEGRRKALSTCGAHFTVVTMFFVPCIFSYMRPSTTLPIDKNMAVFYGILTPMLNPLIYTLRNEEVKDAMRKLFTRSEVVGA

SEQ ID NO: 1304 - protein, 308 aa, Artificial Sequence; identical to SEQ ID NO: 1303
  Synthetic

SEQ ID NO: 1305 - protein, 302 aa, Artificial Sequence
  Synthetic
MDSPRNVTEFFMLGLSQNPQVQRMLFGLFLLVFLVSVGGNMLIIITITFSPTLGSPMYFFLSYLSFIDTCYSSCMTPKLIADSLHEGRAISFEGCLAQFFVAHLLGGTEIILLTVMAYDRYVAICKPLHYTTTMTRHVCIVLVAVAWLGGILHSTAQLFLVLQLPFCGPNVINHFVCDLYPLLELACTDTYVIGLLVVANSGVICLLNFLMLAASYIVILRTLRSHSAEGRRKALSTCGAHFTVVALFFVPCIFIYMRPSSTLSIDKIVAVFYCILTPMFNPLIYTLRNAEVKNAMKNLWRK

SEQ ID NO: 1306 - protein, 302 aa, Artificial Sequence; identical to SEQ ID NO: 1305
  Synthetic

SEQ ID NO: 1307 - protein, 313 aa, Artificial Sequence
  Synthetic
MELHSPPSNVTEFVLLGLTQNPRLQKILFIVFLFVFLFTVLANLLIVLTISFSPTLSAPMYFFLTYLSFIDAFYTSVTTPKMIIDLLYQRRTISLAGCLTQLFVEHFLGGSEIILLIVMAYDRYVAICKPLHYMTIMRQGLCRLLVVVAWIGGILHATMQIFFMINLPFCGPNVIDHFMCDLFPLLKLACRDTHKLGIIVAANSGAMCFLIFTMLLISYIVILRSLKSHSSEGRRKALSTCGSHCTVVVLFFVPCIFTYMRPVTTYPVDKLVTVFFAILTPMLNPIIYTARNTEVKNAMRNLLKRQVTYPVLK

SEQ ID NO: 1308 - protein, 309 aa, Artificial Sequence
  Synthetic
MANRNNVTEFILLGLTENPKMQKIIFVVFSVIYINAMIGNVLIVVTITASPSLRSPMYFFLAYLSFIDACYSSVNTPKLITDSLYENKTILFNGCMTQVFGEHFFRGVEVILLTVMAYDHYVAICKPLHYTTIMKQHVCSLLVGVSWVGGFLHATIQILFICQLPFCGPNVIDHFMCDLYTLINLACTNTHTLGLFIAANSGFICLLNCLLLLVSCVVILYSLKTHSLEARHEALSTCVSHITVVILSFIPCIFVYMRPPATLPIDKAVAVFYTMITSMLNPLIYTLRNAQMKNAIRKLCSRKAISSVK

SEQ ID NO: 1309 - protein, 309 aa, Artificial Sequence
  Synthetic
MENRNNMTEFVLLGLTENPKMQKIIFVVFFVIYIITVVGYVLIVVTITASPSLGSPMYLSLAYLSFIDACYSSVNTPNLITHSLYGKKAILFNGCMTQVFGEHFFGGAEGILLTVMAYDHYVAICKPLHYMTIMNQCVCALLMGVVWMGGFLHATIQILFIFQLPFCGPNVIDHFMCDLNPLLNLACTDTHMLELFIAANSGFICLLNFALLLVSYVVILCSLRTHSLEARHKALSTCVSHITVVILFFVPCIFVYMRPAATLPIDKAVAIFYTMITPMLNPLIYTLKNAQMKNAIRKLCSRKDISGDK

SEQ ID NO: 1310 - protein, 311 aa, Artificial Sequence
  Synthetic
MEIRSNVTEFVLLGLTRNPSMQKIVFAVFVVIYIISMVGNVLIVVTITASPSLGSPMYFFLAYLSFIDACYSSVNTPKLIIDSLHEKKTILFNGCMTQVFGEHFFGGAEGILLTVMAYDRYVAICKPLHYTTIMSRRVCGLLVGVVWVGGFLHATIQILFIFKLPFCGPNVIDHFMCDLNPLLNLACTDTHILGLFVAANSGFICLLNFLLLLVSYVVILRSLRNHSAEGRRKALSTCVSHITVVVLFFVPCIFVYMRPSATLSIDKAVAVFYTMITPLLNPLIYTLRNAQMKDAIKKLCRWKDDVISINK

SEQ ID NO: 1311 - protein, 309 aa, Artificial Sequence
  Synthetic
MENQNNVTEFILLGLTENPKMQKIVFIMFFLIYIISITGNVLIVVTITSTSLLESPMYFFLAYLSFIDACYSSVSTPKLIADSLCEKKTIPFNGCMTQIFGEHLFGGAEIILLTVMAYDRYVAICKPLHYATIMSRRLCSLLVGVSWLGGFLHATIQILFIFQLPFCGPNIIDHFMCDLNPLLNLVCTDTHTLGIFVAANSGFICLLNFLLLLVSYVAILRSLKNHSAEGRRKALSTCISHITVVVLFFVPCIFVYMRPVATLPIDKAVAMFYTMITPMLNPLIYTLRNAQMKDAIKKLGSTKILSSNK

SEQ ID NO: 1312 - protein, 309 aa, Artificial Sequence; identical to SEQ ID NO: 1311
  Synthetic

SEQ ID NO: 1313 - protein, 309 aa, Artificial Sequence
  Synthetic
MEIKNNVTEFVLLGLTQNPQLQKILFVVFLVIYVFSVAGNLLILITITNSQLLGYPMYYFLAYLSFIDACYSSVNTPKLLADTFHKRKSIKFNGCMTQVFAEHFIGGTEVILLTVMAYDRYVAICKPLHYATIMNRRLCNILVGVSWVGGFLHGGIQILFIIELPFCGPNVIDHFMCDLNPLLDLACIDTHILGLFVAANSGFICLLNFLLLLVSYLVILNSLRTHSAEGRRKALSTCVSHITVVVLFFVPCIFVYMRPAATLPIDKAVALFYTMITPMLNPLIYTLRNAQMKNAIWKLFSVKVQSDDK

SEQ ID NO: 1314 - protein, 309 aa, Artificial Sequence
  Synthetic
MEIKNNVTEFVLLGLTQNLHLQKIVFVVFLVIYVFSVVGNLLIVITITNSQLLGYPMYYFLAYLSFIDACYSSVNTPKVIADSLHKRKSIKFNGCMTQVFAEHFIGGTEVILLTVMAYDRYVAICKPLHYATIMNRQLCNILVGVSWVGGFLHGGIQILFIIGLPFCGPNVIDHFMCDLNPLLDLACIDTHILGLFVAANSGFICLLNFLLLLVSYLVILNSLRSHSAEGRRKALSTCVSHITVVVLFFVPCIFVYMRPVATLPIDKAVTLFYTMITPMLNPLIYTLRNAQMKNAIWKLFSVKVQSDDK

SEQ ID NO: 1315 - protein, 310 aa, Artificial Sequence
  Synthetic
MNDTEHMENKRNVTEFILIGLTQNPQMQKVVFVTFLLLYMITISGNLLIVVTVINSQALNSPMYFFLSHLSLIDTIYTSSSAPKLIADSLQENKVISFNGCMAQVYAEHIFGATEIILLTVMAYDRYVAICKPLHYMTIMSHKLCILLVGVAWTGGFLHATIQILFTVWLPFCGPNIIDHFMCDLYPLLELVCMDTHTLGLFVAANSGFICLFNFLLLMGSYVIILRSLKNYSLEGRRKALSTCVSHITVVVLSFIPCIFVYLRPVTTLPIDKAVAVFYTLVAPLLNPLIYTLRNSEVKNAIKKLWRKKI

SEQ ID NO: 1316 - protein, 309 aa, Artificial Sequence
  Synthetic
MENKRNVTEFILIGLTQNPQMQKVVFVTFLVLYMTTISGNLLIVVTIINSQALNSPMYFFLSHLSLIDTIYTSSSAPKLIADSLQENKVISFNGCMAQVYAEHIFGATEIILLTVMAYDRYVAICKPLHYMTIMSHKLCILLVGVAWTGGFLHATIQILFTVWLPFCGPNIIDHFMCDLYPLLELVCMDTHILGLFVAANSGFICLFNFLLLMGSYVIILRSLKNYSLEGRRKALSTCVSHITVVVLFFIPCIFVYLRPVTTLPLDKGVAVFYTMVAPMLNPLIYTLRNAEVKNAIKKLWRKKVTSDSN

SEQ ID NO: 1317 - protein, 309 aa, Artificial Sequence
  Synthetic
MEKKKNVTEFILIGLTQNPIMEKVTFVVFLVLYMITLSGNLLIVVTITTSQALSSPMYFFLTHLSLIDTVYSSSSAPKLIVDSFQEKKIISFNGCMAQAYAEHIFGATEIILLTVMACDCYVAICKPLNYTTIMSHSLCILLVAVAWVGGFLHATIQILFTVWLPFCGPNVIGHFMCDLYPLLKLVCIDTHTLGLFVAVNSGFICLLNFLILVVSYVIILRSLKNNSLEGRCKALSTCISHIIVVVLFFVPCIFVYLRSVTTLPIDKAVAVFYTMVVPMLNPVVYTLRNAEVKSAIRKLWRKKVTSDND

SEQ ID NO: 1318 - protein, 309 aa, Artificial Sequence
  Synthetic
MEKKKNVTEFILIGLTQNPIMEKVTFVVFLVLYMITLSGNLLIVVTITTSQALSSPMYFFLTHLSLIDTVYSSSSAPKLIVDSFQEKKIISFNGCMAQAYAEHIFGATEIILLTVMACDCYVAICKPLNYTTIMSHSLCILLVAVAWVGGFLHATIQILFTVWLPFCGPNVIGHFMCDLYPLLKLVCIDTHTLGLFVAVNSGFICLLNFLILVVSYVIILRSLKNNSLEGRCKALSTCISHIIVVVLFFVPCIFVYLRSVTTLPIDKAVAVFYTMVVPMLNPLVYTLRNAEVKSAIRKLWRKKVTSDND

SEQ ID NO: 1319 - protein, 300 aa, Artificial Sequence
  Synthetic
NNITEFILVGLTQNMELQIFSFVVFFIVYLLTLAGNLLIMVTISSSKALGSPMYFFLSFLSLIDGCCSSSMTPKMLADSLSVRKTISFSGCMTQVFAEHFFGAAEIILLTVMAYDRYVAICKPLRYTIIMNRFVCGLLVGVAWAGGFIHATIQILFTVWLPFCGPNVIDHFMCDLTPLLKLVCMDTHNLGLFVAANSGFICLLNFLLLMISYIVILDALKSHSKEGRCKALSTCVSHITVVILFFVPCIFVYLRPVITFSIDKAVAVFYTMITPMLNPLIYTLRNTEVKNAMKKLCIKVD

SEQ ID NO: 1320 - protein, 310 aa, Artificial Sequence
  Synthetic
MKQINNVTEFILLGLTQNPDVQKLLLVIFALIYSLTLIGNLLIIVTVISSPTLGSPMYFFLSFLSFVDGCCSSTMAPKMIFDLLAERKTISFNGCMTQIFAEHFFGGVEIILLTAMAYDRYVAICKPLHYMITMNRRVCGFLVSTAWAGGFLHALIQILFMVWLPFCGPNIIDHFICDLFPLLKLSCTDNHIFGLFVAANSGLMCMLIFSILLTSYVLIFCSLKTHSTEEQLKALSTCASHITVVLLFFVPCIFVYLRPMVIFPFDKAVAVFYTVITPMLNPLIYTLRNTEVKNAMRKLWNQRKPGKRFT

SEQ ID NO: 1321 - protein, 309 aa, Artificial Sequence
  Synthetic
PNTKLDFEQVNNITEFILLGLTQNAEAQKLLFAVFTLIYFLTMVDNLIIVVTITTSPALDSPVYFFLSFFSFIDGCSSSTMAPKMIFDLLTEKKTISFSGCMTQLFVEHFFGGVEIILLVVMAYDCYVAICKPLYYLITMNRQVCGLLVAMAWVGGFLHALIQMLLIVWLPFCGPNVIDHFICDLFPLLKLSCTDTHVFGLFVAANSGLMCMLIFSILITSYVLILCSQRKALSTCAFHITVVVLFFVPCILVYLRPMITFPIDKAVSVFYTVVTPMLNPLIYTLRNTEVKNAMKQLWSQIIWGNNLCD

SEQ ID NO: 1322 - protein, 306 aa, Artificial Sequence
  Synthetic
MSNVTEFILLGLTQDPDLQKFLFIVCLIIYLITLAGNMLISVTIFISPALATPMYFFLSYLSVIDGFYSSSIAPKMIYDLISEKSTISFNGCMTQLFVEHFFAAAEIILLMSMAYDRYVAICKPLHYMTIMNRPLCVFLVGAAVILGFIHGGIQILFMAQLPFCGPNIIDHFMCDLIPLLELACTDTHTLGPLIAANSGSLCLLIFSMLVASYVVILRSLRNHSAEGRRKALSTCASHVTVVVLFFVPCSYLYLRPMTSFPTDKAVTVFCTLVTPMLNPLIYTLRNEEVKRVMKKLWGRMRKAGDM

SEQ ID NO: 1323 - protein, 304 aa, Artificial Sequence
  Synthetic
MSNVTEFILLGLTQDPDLQKLLFIVCLIIYLITLAGNMLISVTIFISPALATPMYFFLSYLSIIDGFYSSSITPKMIYDLISEKSTISFNGCMTQLFAEHFFAAAEIILLISMAYDRYVAICKPLHYMTIMNRHVCIFLVVAAGIVGFVHGMIQTTFIAQLPFCGPNIINHFICDLIPLLELACTDTHTLGPLIAANSGSMCLLIFSMLVASYVVILRSLRNHSAEGRRKALSTCASHVTVVVLFFVPCSYLYVRPVISFHIDKIVSVFYTLVTPLLNPLIYTLRNEEVKRVMKKLLGSNHVKH

SEQ ID NO: 1324 - protein, 304 aa, Artificial Sequence; identical to SEQ ID NO: 1323
  Synthetic

SEQ ID NO: 1325 - protein, 306 aa, Artificial Sequence
  Synthetic
MNNVTEFILLGLTHNPELQKFLFVMFLITYLITLAGNLLISVIIFISPALGSPMYLFLSYLSIIDIFYSSSIAPKMIFDLISENNTISFNGCMTQLFTEHFFAAAETILLSVMAYDCYVAICKPLHYATIMTQSMCGFLMVVAGILGFVHGGIQTLFIAQLPFCGPNVIDHFMCDLVPLLELACTDTHTLGPLIAANSGSLCFLIFSILDASYVIILCSLRSHSSEGHLKALSSCASHIFTVILFFVPCSYLYLRPLTSFPTDKAVTVFCTLFTPMLNPLIYTVKNKAVKNVIKKLWKQIMTTDDK

SEQ ID NO: 1326 - protein, 305 aa, Artificial Sequence
  Synthetic
MENANNVTEFILVSITKIPELRILFSALFLIMYVATLLGNLLIIVTVTVSPNLRSPMYFFLISLSLLDVIYSSVTAPKLIVDSLSENTTISLEGCMTQLFAEHFFGGVEIILLIVMAYDSYVAICKPLHYTTIVSPRVCWLMVGGAWVGGFAHGTIQLLFMYQIPFCGPNVIDHVICDLFPLLQLACMDTHILALLVILNSGVMCVTIFLILITSYVVILCSLKSSSSEGRRKALSTCSSHFTVVVLFFVPCIILYMRPVVTYPIDNAMALCATIFEPMLNPLIYSLRNAEVKHALRKLWMKRGP

SEQ ID NO: 1327 - protein, 305 aa, Artificial Sequence; identical to SEQ ID NO: 1326
  Synthetic

SEQ ID NO: 1328 - protein, 306 aa, Artificial Sequence
  Synthetic
MMNKNNVTEFILLGVTRDPELRKILSVLFLIMYMATVFGNLLIVVTITRSPSLRSPMYFFLLSLSLMDVTYSSVIAPKLIMDSLSERTIVSFERCMTQLFAEHFFGGVGIILLIVMAYDRYVAICKPLHYVKMMTPRVCCLMVGGAWVGGSMHATIQLLFMYQIPFCSSNIIDHFMCDLFPLLKLACMDTHILGLLVILNSGVMCVSIFLILIASYMVILCSLKSYSSEGRRKALSTCSSHFTVVVLFFVPCIFLYMRPVVTFPIDKAMAVSFTIVEPMLNPLIYTLRNTEVKYAIKNMCRKQGSH

SEQ ID NO: 1329 - protein, 312 aa, Artificial Sequence
  Synthetic
MENQNNVTEFILLGLTENLELWKIFSAVFLVMYVATVLENLLIVVTIITSQSLRSPMYFFLTFLSLLDVMFSSVVAPKVIVDTLSKSTTISLKGCLTQLFVEHFFGGVGIILLTVMAYDRYVAICKPLHYTIIMSPRVCCLMVGGAWVGGFMHAMIQLLFMYQIPFCGPNIIDHFICDLFQLLTLACTDTHILGLLVTLNSGMMCVAIFLILIASYTVILCSLKSYSSKGRHKALSTCSSHLTVVVLFFVPCIFLYMRPVVTHPIDKAMAVSDSIITPMLNPLIYTLRNAEVKSAMKKLWMKWEALAGKLQC

SEQ ID NO: 1330 - protein, 309 aa, Artificial Sequence
  Synthetic
MENQNNVTEFILLGLTENLELWKIFSAVFLVMYVATVLENLLIVVTIITSQSLRSPMYFFLTFLSLLDVMFSSVVAPKVIVDTLSKSTTISLKGCLTQLFVEHFFGGVGIILLTVMAYDRYVAICKPLHYTIIMSPRVCCLMVGGAWVGGFMHAMIQLLFMYQIPFCGPNIIDHFICDLFQLLTLACTDTHILGLLVTLNSGMMCVAIFLILIASYTVILCSLKSYSSKGRHKALSTCSSHLTVVVLFFVPCIFLYMRPVVTHPIDKAMAVSDSIITPMLNPLIYTLRNAEVKSAMKKLWMKWEALAGK

SEQ ID NO: 1331 - protein, 305 aa, Artificial Sequence
  Synthetic
MNVTEFILMGLTQNPQLQRILLLMLLIIYIVTVTGNLLIVGTIVCSQTLNSPMYFFLAFLSLIDACYSSSIIPKMLADLMSERKTISFHGCMIQLFVEHFLGASEIVLLVVMAYDRYVAICRPLHYVTRMNHHNCCVLVGVCWIMGFLHSFGQILVTLWIPFCGPNVMDHFCCDIFPLLQLACADTFLLGLLIAANGGVIPVITFTMLLMSYAVILFSLRTHSTAGRKKALSTCSSHITVVVLFFVPCIYTYMRPVTTFHTDKAIAVFYTLVTPMLNPIIYTVRNAEVKNAIRMILKKNSILDNK

SEQ ID NO: 1332 - protein, 305 aa, Artificial Sequence; identical to SEQ ID NO: 1331
  Synthetic

SEQ ID NO: 1333 - protein, 311 aa, Artificial Sequence
  Synthetic
PNSIQLREKRMNVTEFILMGLTQNPQLQRILFFVLLITYIITVTGNLLIVGTIVCSQSLNSPMYFFLTFLSLIDACYSSCTIPKMLVDLLSETKTISFNGCILQLFVEHFLGASEIVLLVVMAYDRYVAICRPLHYASRMNHHMCCLLVGICWIVGFLHSFGQILVTLWIPSCGPNILDHFFCDIFPLLQLACTDTFLLGLLVACNGGVIPVITFTMLLMSYAVILYSLRTHSTAGRKKALSTCGSHITVVVLFFVPCIFMYMRPVATFPMDKAIAVFYIIITPLLNPVIYTVRNAEVKSAIRMLLKRMHL

SEQ ID NO: 1334 - protein, 310 aa, Artificial Sequence
  Synthetic
MQNQSLVNEFILLGLSQNTKVEKILFLLFLLIYLATIGGNMIIVATIIYSPALLSPMYFFLVFLSLLDACTSTVVTPKMIVGFFYERKIISFEGCMTQLFAIHFFTAVEVIVLSAMAYDRYVAICKPLHYLSIMSKRVCGVLVGIAWAGGFLHSIIQIVFTLQLPFCGPNVIDHYMCDLFPLLKLACTDTQIFVILVFANSSSICIIIFSLLLVSYGVILFSLRAHSSEGRYKALSTCGSHITVVVLFFVPCILIYARPSSPFSFEKNTLIFANVLTPLLNPMVYTFRNKEMKSAIRKMWKRLVVVSDKY

SEQ ID NO: 1335 - protein, 310 aa, Artificial Sequence
  Synthetic
MENQSIVNEFILLGLSQNPKIENILFVVFLLVYLATIGGNMMIIATIIYSPALLSPMYFFLIFLSLLDTCTSTVVTPKLILDFFYERKTISFEGCMTQLFAFHFFTGAEVIVLAAMAYDRYVAICKPLHYSSIMTWRVCGVLLGVAWTGGFLHSIIQIIFTLQLPFCGPNVIDNYICDLFPLLKLACTDTHIFVFLVFANSGSICIIIFSLLLVSYGVILFSLRGHSSEGRLKALSTCGSHITVVVLFFVPCILIYARTTSPFPYEKYVAIFVNVITPLLNPMVYTFRNKEMKNAIQKMCRRSKVVSDNY

SEQ ID NO: 1336 - protein, 316 aa, Artificial Sequence
  Synthetic
NISLKTMQNQSFVTEFILLGLSQNPNVENILCVVFLFIYLATIGGNIMIVVTIIYSPALLSPMYFFLIFLSLLDACTSSTVTPKMMVDLFYERKTISFECCMTQLFAIHFFTGIEVIILSAMAYDRYVAICKPLHYSSIMTRRLCGILVMVSWTGGFLHSLIQIIFTLQLPFCGPNVIDHYLCDLFPLLKLACTDTHIFVILVFSNSGSISIIIFSILLVSYGVILFSLRAHSSEGRRKALSTCGSHITVVLLFFVPCFLIYARPPSAFSSEKNAFVFATIITPLLNPMVYTFRNKEMKNAIRKMWKKLIVVSHDF

SEQ ID NO: 1337 - protein, 316 aa, Artificial Sequence; identical to SEQ ID NO: 1336
  Synthetic

SEQ ID NO: 1338 - protein, 309 aa, Artificial Sequence
  Synthetic
MLNHSSVTEFILLGLSQNSKVEKVLFVIFLLIYLATIGGNMIIVVTIIYSPALLSPMYFFLIFLSFLDACTSSTVTPKMIVDFFYEKKTISFECCMTQLFAVHFFTGMEVIVLSAMAYDRYVAICKPLHYSSIMTRRLCGILVMLSWAGGFLHSIIQIIFTLQLPFCGPNVIDHYMCDLFPLLKLACTDTHIFVILVFANSGSICIIIFSILLVSYSVILFSLRAHSSEGRRKALSTCGSHITVVLLFFVSCILIYARPAAFSSEKNALVFATIITPLLNPMVYTFRNREMKNAIRKLWKRWKVVSGDI

SEQ ID NO: 1339 - protein, 308 aa, Artificial Sequence
  Synthetic
MNNQSCVTEFIFLGLSQNSKVEKILFFIFLLIYLATIGGNMIIVVTIIYSPALLSPMYFFLIFLSLLDACTSSTVTPKMIVDFFYDRKTISFECCMTQLFAVHFFTGMEVIVLSAMAYDRYVAICKPLHYSSIMNRRLCGNLVMVSWAGGFLHSIIQIIFMLQLPFCGPNVIDHYMCDLFPLLKLACTDTYIFVILVFANSGSICIIIFSILLVSYGVILYSLRAHSSEGKFKALSTCGSHIIVVVLFFVPCILTYARPISAFSFEKNAVVFTTVLTPLLNSVVYTFRNKEMKNAIRKMWKKAVSDKH

SEQ ID NO: 1340 - protein, 302 aa, Artificial Sequence
  Synthetic
MQNQSFVTEFILLGLSQNLNVEKMLFVLFLFIYIATIGGNMMIVVTIIYSPALLSPMYFFLAFLSFLDACTSSTVTPKIIVDCFYERKTISFECCMTQLFTVHFFTGAEVIVLASMAYDRYVAICKPLHYSSIMTQRLCGILVVVSWAGGFLHSIIQIIFTLQLPLCGPNVIDHYMCDLFPLLKLACTDTHIYVLLIFANSGAICIIIFSLLIVSYGVILFSLRAQSSEGRRKALSTCGSHITVVLLFFVPCILIYARPTSAFSFEKNMLIFVNVLTPLLNPMVYTFRNKEMINAIKKIWKR

SEQ ID NO: 1341 - protein, 310 aa, Artificial Sequence
  Synthetic
MQNQSFVTEFILLGLSQNLYVEKILFVLFLLIYLATIGGNMIIVVTIIYSPALLSPMYFFLIFLSLLDALTSSTVTPKIIVDCFYERKTISFECCMTQLFTVHFFTGAEVIVLASMAYDRYVAICKPLHYSSIMTRRLCGILVVVSWAGGFLHSIIQIIFTLQLPFCGPNVIDHYMCDLFPLLKLACTDTHIYVLLIFANSGAICIIIFSLLLVSYGIILFSLRAHSSEGRRKALSTCGSHIIVVLLCFVPCLLIYARPTSAFSFEKNMLIFINVLTPLLNPMVYTFRNKEMKNAIGKMWKRLIVVSDKF

SEQ ID NO: 1342 - protein, 310 aa, Artificial Sequence
  Synthetic
MQNQSFVTEFILLGLSQNPKVEKILFVVFLLVYIATIGGNMIIVVTIIYSPALLSPMYFFLIFLSFLDACTSSTVTPKMIVDFFYERKTISFECCITQLFTSHFFAGVEVIILTSMAYDRYVAICKPLHYSSIMTRRLCGTLVMVAWTGGFLHSITQVIFTLQLPFCGPNFIDHFICDLFPLLQLACTDTHIFVILVFANSGSFCIIIFSLLIVSYGVILFSLRGHSSEGRRKALSTCGSHITVMILFFVPCMLIYARPSSAFSFEKNTLIFASVLTPLFNPMVYTFRNKEMKNAIRKMCRKLLVDSDNF

SEQ ID NO: 1343 - protein, 310 aa, Artificial Sequence
  Synthetic
MLNQSFVTEFILLGLSQNPKVEKILFVLFFLVYLATIGGNIVIVVTILFSPALFSPMYFFLSFLSFLDACISSVITPKMIVDFFYETKTISFECCMVQLFAVHFFTGVEVIVLSAMAYDRYVAICKPLHYSSIMNQRLCVILVGIAWAGGFLHSITQIIFTLQLPFCGPNVIEHFICDLFPLLKLACTNTHIFVILVFANSGSICIIIFSLLLVSYGVILFSLRSHSSEGRSKALSTCGSHITVVLLFFVPCILIYARNTSAFSFEKNVFIFADVLTPLLNPMVYTFRNKEMKNAIKKIWRRLFNISDKH

SEQ ID NO: 1344 - protein, 310 aa, Artificial Sequence
  Synthetic
MQNQSIVTEFILLGLSQNPKVEKILSVLFFLVYLATIGGNIIIVVTIVFSPALSSPMYFFLSFLSFLDACVSSVITPKMIVDFFYERKTISFECCMIQLFAVHFFTGVEVIVLSAMAYDRYVAICKPLHYSSIMTQRLCGILVGIAWAGGFLHSIIQIIFTLQLPFCGPNVIDHFICDLFPLLKLACTNTHIFVILVFANSGSICIIIFSILLVSYGVILFSLRNHSSEGRRKALSTCGSHITVVLLFFVPCILIYARNNSEFSFEKNVFIFDDVLTPMLNPLAYTFRNKEMKNAIKKMWRRLFNISDKH

SEQ ID NO: 1345 - protein, 311 aa, Artificial Sequence
  Synthetic
MQNQTIVTEFVLLGLSQNPKVEKLLFVIFLLLYLATIGGNMTIVVTIASSPVLLSPMYFFLAFLSLLDACVSSIVTPTMIIDLFYKRKTISFECCMTQVFSVHFFSAVEVIILAAMAYDRYVAICKPLHYSSIMNRRLCGILVGIAFAGGFLHSIIQIIFTLQLPFCGPNFIDHFICDLFPLLKLACTDTHIFVILVFANSGSICIIIFSFLLVSYVVILFSLRTHSSEGRRKALSTCGSHITVVVLFFVPCILIYARPTSPFSLEKNVFIFADVLTPLLNPVVYTFRNKEMKNAIRKMWRSLLVAPDILK

SEQ ID NO: 1346 - protein, 310 aa, Artificial Sequence
  Synthetic
MHNQSYVNEFILLGLSQNPQIVKISFVIFLLVYLATLVGNMIIVVTIVYSPALLSPMYFFLAFLSFLDACVSSVVTPKMIVDMTYERKIISFECCMTQVFAVHFLTAVEVIVLAAMAYDRYVAICKPLHYSFIMNRRLCGTLVGVAWAGGFLHSIIQIAFILKLPFCGPNVIDHFICDLFPLLKLACTDIHIFIILVFANSGSICIIIFSFLLISYGVILFSLRAHSSEGRRKALSTCGSHITVVVFFFVSCILIYARPTSAFSFEKNVFVFTDVLTPLLNPMVYTFRNKEMINAIRKMRKRLIMVPDKY

SEQ ID NO: 1347 - protein, 308 aa, Artificial Sequence
  Synthetic
MQNQSSVTEFIILGLSQNPKIEKILFVVFLLVYMATVGGNMIIVVTIIYSPALLSPMYFFLAFLSFLDACVSSTVTPKMVVDFLHEKKTISFGCCMTQLFSVHFFSGAEMIVLAAMAYDRYVAICKPLHYSSILTRRLCSILVAISWAGGFLHAIVQVIFTLQLPLCGPNVIDHYMCDLFPLLKLACTDTHIFVLLVFANSGAICIIIFSLLLVSYGVILFSLRAHSSEGRRKALSTCGAHVTVVVLFLVPCILIYARDTSAFSYEKDTLIFVNVLTPLLNPMVYTFRNKEMINAIRKMWKRVIFVRY

SEQ ID NO: 1348 - protein, 308 aa, Artificial Sequence
  Synthetic
MQNQSFVTEFIILGLSQNPIVEKILFFVLLLVYLATIGGNIIIVVTIMYSPALLSPMYFFLAFLSFLDLCVSSTVIPKMIVDFFYEKKTISFGCCMMQLFSVHFFSGTEMIVLAAMAYDRYVAICKPLHYFSILTRRLCSILVAISWAGGFLHSIIQVIFTLQLPLCGPNVIDHYTCDLFPLLKLACTDTHIFVLLVFANSGAICIIIFSLLLVSYGVILFSLRAHSSEGRRKALSTCGAHVTVVVLFLVPCILIYARDTSAFSFEKHTLLFVNVLTPLLNPTVYTFRNKEMINAIRKMCKRMIFVRF

SEQ ID NO: 1349 - protein, 308 aa, Artificial Sequence
  Synthetic
MQNQTLVTEFLLLGLSQNPKVQKIVFVVFLFIYIATVGGNMIIVVTIICSRALLSPMYFFLACLSFLDACISSVITPKVTVDLLYEKRTISFEGCMAQVFAVHFFTGVEVIVLISMAYDRYVAICKPLYYSSIMNRRLCGILMGMAWTGGFLHSTIQIVFILCLPFCGPNVIDHFLCDLFPLLKLACTDTYIFVILVFANSGSFCIIIFSLLLISYGVILFSLRTHSTEGRRKALSTCGSHITVVVLFFVPCIIIYARPTSAFFSEKNMFLFATILTPLLNPMIYTFRNKEMKNAIRKIWKKLDYGIS

SEQ ID NO: 1350 - protein, 314 aa, Artificial Sequence
  Synthetic
MQNQSFVTEFVLLGLSQNPNVQEIVFVVFLFVYIATVGGNMLIVVTILSSPALLSPMYFFLGFLSFLDACFSSVITPKMIVDSLYVTKTISFEGCMMQLFAEHFFAGVEVIVLTAMAYDRYVAICKPLHYSSIMNRRLCGILMGVAWTGGLLHSMIQILFTFQLPFCGPNVINHFMCDLYPLLELACTDTHIFGLMVVINSGFICIINFSLLLVSYAVILLSLRTHSSEGRWKALSTCGSHIAVVILFFVPCIFVYTRPPSAFSLDKMAAIFYIILNPLLNPLIYTFRNKEVKQAMRRIWNRLMVVSDEKENIK

SEQ ID NO: 1351 - protein, 320 aa, Artificial Sequence
  Synthetic
LYMIPVGANQSFVTEFVLLGLSQNPNVQEIVFVVFLFVYIATVGGNMLIVVTILSSPALLSPMYFFLGFLSFLDACFSSVITPKMIVDSLYVTKTISFEGCMMQLFAEHFFAGVEVIVLTAMAYDRYVAICKPLHYSSIMNRRLCGILMGVAWTGGLLHSMIQILFTFQLPFCGPNVINHFMCDLYPLLELACTDTHIFGLMVIINSGFICIINFSLLLVSYAVILLSLRTHSSEGCWKALSTCGSHIAVVILFFVPCIFVYTRPPSAFSLDKMAAIFYIILNPLLNPLIYTFRNKEVKQAMRRIWNRLMVVSERKKILN

SEQ ID NO: 1352 - protein, 311 aa, Artificial Sequence
  Synthetic
MMQNQSFVTEFIFLGLSQNPKVQKIVFIVFLFVYIATVGGNMIIVVTIVCSPALICPMYFFLAFLSLLDACFSSVITPKMVVDSLYEKKTISFEGCMMQLFAEHFLAAVEVIVLTAMAYDRYVAICKPLHYSSIMNWRLCGTLMGIAWTGGFLHSIIQIIFTLQLPFCGPNVIDHFMCDLFPLLELACTDTHIFGLLVVANSGSICIIIFSILLVSYGVILFSLKAHSSEGRWKALSTCGSHIAVVVLFFVPCIFIYARPPSAFSFDKMVAIFYTILTPLLNPVIYTFRNKDMKNAMKKVWKRLAVVSDGK

SEQ ID NO: 1353 - protein, 310 aa, Artificial Sequence
  Synthetic
MQNQSFVTEFVFLGLSQNPNLQKLIFIICLVVYIATMGSNMMIVVTVVCSPTLLSPMYFFLAFLSLLDASFSSAMTPKMILDSLYKRKTISFEGCMIQLFVEHFLGGAEMILLTAMAYDRYVAICKPLHYSSIMTRKVCGTLVGVAWAGGLLHSTVQIIFTLQLPFCGPNVINHFMCDLFPLLELACTDTHIFGLFVVANSGLICIIVFVLLLVSYGFILLSLRSQSSEGRWKALSTCGSHVAVVVLFFVPCIFIYARPHSAFSFDKMVALFYTMLSPLLNPIIYTFRNKDMKNAIRKLWKKLVMVSDER

SEQ ID NO: 1354 - protein, 310 aa, Artificial Sequence
  Synthetic
MQNQSFITEFVFLGLSQNPNVQKIIFVICLLVYIATIGGNMMIVVTVVSTPALLSPMYFFLAFLSLLDASFSSAMTPKMIVDSLYERKTISFEGCMIQLFAEHFFGGAEVIVLSAMAYDRYVAICKPLHYSSIMTLRLCGTLVGVAWTGGFLHSIIQIIFTLQLPFCGPNIIDHFICDLYPLLELACTDTHIFGLLVVANSGFICIIIFTLLLVSYGFILLSLRSHSSEGRWKALSTCGSHIAVVVLFFVPCIFTYARPPTAFSFDKMVAIFYTMLSPLLNPMIYTFRNKDMKNAIRKMWTRLIVHSDKK

SEQ ID NO: 1355 - protein, 310 aa, Artificial Sequence
  Synthetic
MPNQTIVTEFILLGLSENPTVQKIVFVVFSFVYMATIGGNIIIAVTILCTPALLSPMYFFLAFLSFLDACITSVITPKMIVDSVNESKTISFEGCMTQIFAEHFFAAVEVIVLISMAYDRYVAICKPLHYSSIMNWRLCGTLVGIAWAGGFLHSIIQIIFTLQLPFCGPNVIDHFMCDLFPLLELACTNTYVYGLLVFANSGSICIIIFSMLLISYGVILFSLRSHSSEGRWKALSTCGSHIAVVVSFFVPCIFIYARSTSASSFEKKVAVFDGIMTPLLNPLIYTFRNKEMKNAIRKMWNRFRMVSDKF

SEQ ID NO: 1356 - protein, 309 aa, Artificial Sequence
  Synthetic
MGAKNNVTEFVLFGLFESREMQHTCFVVFFLFHVLTVLGNLLVIITINARKTLKSPMYFFLSQLSFADICYPSTTIPKMIADTFVEHKIISFNGCMTQLFSAHFFGGTEIFLLTAMAYDRYVAICRPLHYTAIMDCRKCGLLAGASWLAGFLHSILQTLLTVQLPFCGPNEIDNFFCDVHPLLKLACADTYMVGLIVVANSGMISLASFFILIISYVIILLNLRSQSSEDRRKAVSTCGSHVITVLLVLMPPMFMYIRPSTTLAADKLIILFNIVMPPLLNPLIYTLRNNDVKNAMRKLFRVKRSLGEK

SEQ ID NO: 1357 - protein, 309 aa, Artificial Sequence; identical to SEQ ID NO: 1356
  Synthetic

SEQ ID NO: 1358 - protein, 310 aa, Artificial Sequence
  Synthetic
MEKANQTSVMSFRLTGLSTNPKVQMAIFFIFLIFYVLTLVGNILIVVTIIHDHRLHTPMYFFLSNLSFIDVCHSTVTVPKMLSDTFSEEKLISFDDCVVQIFFLHLFACTEIFLLTVMAYDRYVAICKPLRYMTIMNWKVCMVLGGAMWTAGTIHSISFTSLTIKLPYCGPNELDSFFCDVPQVIELACTDTRITEILVVSNSGMISMVCFVIIVVSYAVILVSLRQQISDGKRKALSTCAAHLTVVTLFLGHCIFIYSRPAISLPEDKIVSAFFTAITPLLNPIIYTFRNEDMKSALKKLIRRKEGKEK

SEQ ID NO: 1359 - protein, 313 aa, Artificial Sequence
  Synthetic
MEKAVLINQTSVMSFRLTGLSTNPKVQMAIFFIFLIFYVLTLVGNILIVITIIHDHRLHTPMYFFLSNLSFIDVCHSTVTVPKMLSDTFSEEKLISFDDCVVQIFFLHLFACTEIFLLTVMAYDRYVAICKPLRYMTIMNWKVCMVLGGAMWTAGTIHSISFTSLTIKLPYCGPNELDSFFCDVPQVIELACTDTRITEILVVSNSGMISMVCFVIIVVSYAVILVSLRQQISDGKRKALSTCAAHLTVVTLFLGHCIFIYSRPAISLPEDKIVSAFFTAITPLLNPIIYTFRNEDMKSALKKLIRRKEGKEK

SEQ ID NO: 1360 - protein, 310 aa, Artificial Sequence
  Synthetic
MEKAVLINETSVMSFRLTGLSTNPLVQMAVFFIFLIFYVLTLVGNILIVITIIYDRRLHTPMYFFLSNLSFIDVCHSTVTVPKMLSDTFSEEKLISFDACVVQMFFLHLFACTEIFLLTVMAYDRYVAICKPLQYMTIMNWKVCMMLAAALWTGGTIHSISLTSLTIKLPYCGPDEIDNFFCDVPQVIKLACTDTHIIEILIVSNSGLISVVCFVVLVVSYAVILVSLRQQISDGKRKALSTCAAHLTVVTLFLGHCIFIYSRPSTSLPEDKVVSVFFTAVTPLLNPIIYTLRNEDMKSALNKLIKRREK

SEQ ID NO: 1361 - protein, 313 aa, Artificial Sequence
  Synthetic
MDSLNQTRVTEFVFLGLTDNRVLEMLFFMAFSAIYMLTLSGNILIIIATVFTPSLHTPMYFFLSNLSFIDICHSSVTVPKMLEGLLLERKTISFDNCITQLFFLHLFACAEIFLLIIVAYDRYVAICTPLHYPNVMNMRVCIQLVFALWLGGTVHSLGQTFLTIRLPYCGPNIIDSYFCDVPLVIKLACTDTYLTGILIVTNSGTISLSCFLAVVTSYMVILVSLRKHSAEGRQKALSTCSAHFMVVALFFGPCIFIYTRPDTSFSIDKVVSVFYTVVTPLLNPFIYTLRNEEVKSAMKQLRQRQVFFTKSYT

SEQ ID NO: 1362 - protein, 313 aa, Artificial Sequence
  Synthetic
MDSLNQTRVTEFVFLGLTDNRVLEMLFFMAFSAIYMLTLSGNILIIIATVFTPSLHTPMYFFLSNLSFIDICHSSVTVPKMLEGLLLERKTISFDNCITQLFFLHLFACAEIFLLIIMAYDRYVAICTPLHYPNVMNMRVCIQLVFALWLGGTVHSLGQTFLTIRLPYCGPNIIDSYFCDVPLVIKLACTDTYLTGILIVTNSGTISLSCFLAVVTSYMVILVSLRKHSAEGRRKALSTCSAHFMVVALFFGPCIFIYTRPDTSFSIDKVVSVFYTVVTPLLNPFIYTLRNEEVKSAMKQLRQRQVFFTKSYT

SEQ ID NO: 1363 - protein, 308 aa, Artificial Sequence
  Synthetic
MGALNQTRVTEFIFLGLTDNWVLEILFFVPFTVTYMLTLLGNFLIVVTIVFTPRLHNPMYFFLSNLSFIDICHSSVTVPKMLEGLLLERKTISFDNCIAQLFFLHLFACSEIFLLTIMAYDRYVAICIPLHYSNVMNMKVCVQLVFALWLGGTIHSLVQTFLTIRLPYCGPNIIDSYFCDVPPVIKLACTDTYLTGILIVSNSGTISLVCFLALVTSYTVILFSLRKQSAEGRRKALSTCSAHFMVVALFFGPCIFLYTRPDSSFSIDKVVSVFYTVVTPLLNPLIYTLRNEEVKTAMKHLRQRRICS

SEQ ID NO: 1364 - protein, 318 aa, Artificial Sequence
  Synthetic
TLGLEKNKNSSDVSRFVLLGLSSSWELQLFLFFTFLLIYLVIVLGNLLIVMVVQADAHLFSPMYYFLSHLSFIDLCLSCVAVPKMLGDFLQKEKTISFSGCLAQVFFLHFLGASEMFLLTVMAYDRYVAICNPLHYLTVMNNHLRLRLVFGCWCGGFIHSITQVMIVIQLPFCGPNELDNFYCDVPQVVKLACMDTYLVEVLMVSNSGILSLVCFLVLLFSYALILITLRTHLHRGQSKALSTCASHLTVVSLIFVPCVFIYLRPFCTFSVDKVVSVFYTVITPMLNPLIYTLRNADMKQAIEKLRKKQVASHCFAKG

SEQ ID NO: 1365 - protein, 318 aa, Artificial Sequence; identical to SEQ ID NO: 1364
  Synthetic

SEQ ID NO: 1366 - protein, 312 aa, Artificial Sequence
  Synthetic
MKKEQDSNVTEFVLLGLSSSWELQLFLFLLFLFFYIAIVLGNLLIVVTVQAHAHLLSPMYYFLGHLSFIDLCLSCVTVPKMLGDFLQQGKSISFSGCLAQIYFLHFLGASEMFLLTVMAYDRYVAICNPLRYLTVMNPQLCLWLVLACWCGGFIHSIMQVILVIQLPFCGPNELDNFYCDVPQVIKLACMDTYVVEVLVIANSGLLSLVCFLVLLFSYAIILITLRTHFCQGQNKVFSTCASHLTVVSLIFVPCVFIYLRPFCSFSVDKIFSLFYTVITPMLNPLIYTLRNTDMKTAMKKLRIKPCGIPLPC

SEQ ID NO: 1367 - protein, 311 aa, Artificial Sequence
  Synthetic
METANYTKVTEFVLTGLSQTREVQLVLFVIFLSFYLFILPGNILIICTIRLDPHLTSPMYFLLANLALLDIWYSSITAPKMLIDFFVERKIISFGGCIAQLFFLHFVGASEMFLLTVMAYDRYAAICRPLHYATIMNRRLCCILVALSWMGGFIHSIIQVALIVRLPFCGPNELDSYFCDITQVVRIACANTFPEELVMICSSGLISVVCFIALLMSYAFLLALLKKHSGSGENRAMSTCYSHITIVVLMFGPSIYIYARPFDSFSLDKVVSVFHTVIFPLLNPIIYTLRNKEVKAAMRKVVTKYILCEEK

SEQ ID NO: 1368 - protein, 311 aa, Artificial Sequence
  Synthetic
METANYTKVTEFVLTGLSQTPEVQLVLFVIFLSFYLFILPGNILIICTISLDPHLTSPMYFLLANLAFLDIWYSSITAPEMLIDFFVERKIISFDGCIAQLFFLHFAGASEMFLLTVMAFDLYTAICRPLHYATIMNQRLCCILVALSWRGGFIHSIIQVALIVRLPFCGPNELDSYFCDITQVVRIACANTFPEELVMICSSGLISVVCLIALLMSYAFLLALFKKLSGSGENRAMSTCYSHITIVVLMFGPSIYIYARPFDSFSLDKVVSVFNTLIFPLRNPIIYTLRNKEVKAAMRKLVTKYILCKEK

SEQ ID NO: 1369 - protein, 311 aa, Artificial Sequence
  Synthetic
METANYTKVTEFVLTGLSQTPEVQLVLFVIFLSFYLFILPGNILIICTISLDPHLTSPMYFLLANLAFLDIWYSSITAPEMLIDFFVERKIISFDECIAQLFFLHFAGASEMFLLTVMAFDLYTAICRPLHYATIMNQRLCCILVALSWRGGFIHSIIQVALIVRLPFCGPNELDSYFCDITQVVRIACANTFPEELVMICSSGLISVVCLIALLMSYAFLLALLKKLSGSGENRAMSTCYSHITIVVLMFGPSIYIYARPFDSFSLDKVVSVFHTVIFPLLNPIIYTLRNKEVKAAMRKVVTKYILCKEK

SEQ ID NO: 1370 - protein, 311 aa, Artificial Sequence
  Synthetic
MEPANDTTVTEFILTGLSQTREVQLVLFVIFLSFYLFILPVNILIICTIRLDSHLSSPMYFLLANLAFLDIWYSSITAPKMLVDFFVERKIISFGGCIAQLFFLHFVGASEMFLLTVMAFDRYAAICRPLHYATIMNRRLCCILVALSWTGGFVHSIIQVALIVRLPFCGPNELDNYFCDITQVVRIACANTFLEEMVMIFSSGLISVVCFIALLMSYAFLLTMLKKHSSSGESRAISTCYSHITIVVLMFGPSIYIYARPFDSFSLDKVVSVFHTVIFPLLNPIIYTLRNKEVKAAMRKLVNRYIFCKEK

SEQ ID NO: 1371 - protein, 311 aa, Artificial Sequence; identical to SEQ ID NO: 1370
  Synthetic

SEQ ID NO: 1372 - protein, 308 aa, Artificial Sequence
  Synthetic
METENRTVVTEFILIGLTQSHDIQRLVFVLSLIFYIIILPGNILIILTIRSDPGLTAPLYFFLGNLAFLDASYSFIVAPRMLVDFFSEKKIISYKACITQLFFLHFLGGGEGLLLVVMAFDRYIAICRPLHYSTVMSPRACYVMLLALWLGGFIHSIIQVVLILRLPFCGPNHLDNFFCDVPQVIKLACTDTFAVELLMIFNSGLLTLLCFLGLLTSYAVILCHVHRSASEGKNKAISTCTTHVIIIFIMFGPAIFIYTRPFTALSADKVVSFFHTVIFPLMNPVIYTLRNQEVKTSMKKLIIRHIIC

SEQ ID NO: 1373 - protein, 308 aa, Artificial Sequence; identical to SEQ ID NO: 1372
  Synthetic

SEQ ID NO: 1374 - protein, 308 aa, Artificial Sequence
  Synthetic
METENRTVVTEFIFTGLTESLDIQRLVFVLSLIFYIIILPGNVFIILTIISDPGLTAPLYLFLGNLAFLDASYSFIVAPRMLIDIFSEKKIISYKACITQLFFLHFLGGGEFLLLVVMAFDRYIAICRPLYYSTVMNPRVCYVMLLAPWLGGFIHSIIQVVLILRLPFCGPNHLDNFFCDVPQVIKLACTDTFAVEILMIFNSGLLTLVCFLGLLTSYAVILCHVHRSASEGKNKAISTCTTHVIIIFLMFGPAIFIYTRPFTALSADKVVSFFHTVIFPLLNPVIYTLRNQEVKTSMKKLFIRQVIC

SEQ ID NO: 1375 - protein, 316 aa, Artificial Sequence
  Synthetic
MKIANNTVVTEFILLGLTQSQDIQLLVFVLILIFYLIILPGNFLIIFTIRSDPGLTAPLYLFLGNLAFLDASYSFIVAPRMLVDFLSEKKVISYRGCITQLFFLHFLGGGEGLLLVVMAFDRYIAICRPLHCSTVMNPRACYAMMLALWLGGFVHSIIQVVLILRLPFCGPNQLDNFFCDVRQVIKLACTDMFVVELLMVFNSGLMTLLCFLGLLASYAVILCHVRRAASEGKNKAMSTCTTRVIIILLMFGPAIFIYMCPFRALPADKMVSLFHTVIFPLMNPMIYTLRNQEVKTSMKRLLSRHVVCQVDFIIRN

SEQ ID NO: 1376 - protein, 316 aa, Artificial Sequence; identical to SEQ ID NO: 1375
  Synthetic

SEQ ID NO: 1377 - protein, 307 aa, Artificial Sequence
  Synthetic
MESENRTVIREFILLGLTQSQDIQLLVFVLVLIFYFIILPGNFLIIFTIKSDPGLTAPLYFFLGNLAFLDASYSFIVAPRMLVDFLSAKKIISYRGCITQLFFLHFLGGGEGLLLVVMAFDRYIAICRPLHYPTVMNPRTCYAMMLALWLGGFVHSIIQVVLILRLPFCGPNQLDNFFCDVPQVIKLACTDTFVVELLMVFNSGLMTLLCFLGLLASYAVILCRIRGSSSEAKNKAMSTCITHIIVIFFMFGPGIFIYTRPFRAFPADKVVSLFHTVIFPLLNPVIYTLRNQEVKASMKKVFNKHIA

SEQ ID NO: 1378 - protein, 307 aa, Artificial Sequence; identical to SEQ ID NO: 1377
  Synthetic

SEQ ID NO: 1379 - protein, 308 aa, Artificial Sequence
  Synthetic
METQNLTVVTEFILLGLTQSQDAQLLVFVLVLIFYLIILPGNFLIIFTIKSDPGLTAPLYFFLGNLALLDASYSFIVVPRMLVDFLSEKKVISYRSCITQLFFLHFLGAGEMFLLVVMAFDRYIAICRPLHYSTIMNPRACYALSLVLWLGGFIHSIVQVALILHLPFCGPNQLDNFFCDVPQVIKLACTNTFVVELLMVSNSGLLSLLCFLGLLASYAVILCRIREHSSEGKSKAISTCTTHIIIIFLMFGPAIFIYTCPFQAFPADKVVSLFHTVIFPLMNPVIYTLRNQEVKASMRKLLSQHMFC

SEQ ID NO: 1380 - protein, 308 aa, Artificial Sequence; identical to SEQ ID NO: 1379
  Synthetic

SEQ ID NO: 1381 - protein, 308 aa, Artificial Sequence
  Synthetic
MEIKNSSVVTEFILLGLTQSQEAQLLVFALISVFYLIILPGNFLIIFTIRSDSGLTAPLYFFLGNLAFLDASYSFIVAPRMLVDFFCEKKVISYKACITQLFFLHFLGAGEMFLLVVMAVDRYIAICRPLYYSTLMNPRVCYALLLALWLGGFAHSIVQVALILNLPFCGPNQLDNFFCDVPQVVKLACTDTFAVELLMVSNSGLLTLLCFLGLLASYAVILYHVKGHSSEGKSKAISTCTTHIIIVFLMFGPAIFIYTRPFQALQADKVVSLFHTVIFPLMNPVIYTLRNQEVKTSMRKLLSQYVIC

SEQ ID NO: 1382 - protein, 314 aa, Artificial Sequence
  Synthetic
GEDPMEPQNTTQVSMFVLLGFSQTQELQKFLFLLFLLVYVTTIVGNLLIMVTVTFDCRLHTPMYFLLRNLALIDLCYSTVTSPKMLVDFLHETKTISYQGCMAQIFFFHLLGGGTVFFLSVMAYDRYIAISQPLRYVTIMNTQLCVGLVVAAWVGGFVHSIVQLALILPLPFCGPNILDNFYCDVPQVLRLACTDTSLLEFLMISNSGLLVIIWFLLLLISYTVILVMLRSHSGKARRKAASTCTTHIIVVSMIFIPCIYIYTWPFTPFLMDKAVSISYTVMTPMLNPMIYTLRNQDMKAAMRRLGKCLVICRE

SEQ ID NO: 1383 - protein, 310 aa, Artificial Sequence
  Synthetic
MEPQNTTQVSMFVLLGFSQTQELQKFLFLLFLLVYVTTIVGNLLIMVTVTFDCRLHTPMYFLLRNLALIDLCYSTVTSPKMLVDFLHETKTISYQGCMAQIFFFHLLGGGTVFFLSVMAYDRYIAISQPLRYVTIMNTQLCVGLVVAAWVGGFVHSIVQLALILPLPFCGPNILDNFYCDVPQVLRLACTDTSLLEFLMISNSGLLVIIWFLLLLISYTVILVMLRSHSGKARRKAASTCTTHIIVVSMIFIPCIYIYTWPFTPFLMDKAVSISYTVMTPMLNPMIYTLRNQDMKAAMRRLGKCLVICRE

SEQ ID NO: 1384 - protein, 313 aa, Artificial Sequence
  Synthetic
MEPQNITWVSEFILLGFSQTQELQKLLFVVFLCVYITTVVGNILIMITVTFDPRLDMPMYFLLRNLAVIDLSYSTVTSPKMLVDFFHKTKTISYQGCMAQIFFFHLLGGGTVFFLSVMAYDRYIAISQPLHYVTIMNTKLCVGLVVASWVGGFAHSIVQLSLMLPLPFCGPNVLDNFYCDVPQVLRLACTDTSLLEFLMISNSGMLVLIWFLLLLISYTVILVMLRSHSGQARRKAASTCTTHIIVVSMIFIPCIYIYSRPFTPFPLDKAVSISYTVLTPMLNPMIYTLRNQEMQAAMKRLAEHLVLTKRNEL

SEQ ID NO: 1385 - protein, 311 aa, Artificial Sequence
  Synthetic
MEPGNLTWVSEFIFLGFSEIWELQVFLFVVFLCVYSTTVVGNLLIIVTVSSDPRLHTPMYFLLRNLAVLDLCFSSVTAPKMLVDFLSEKKTISYRGCMVQIFFFHFLGGAMVFFLSVMAYDRLVAISRPLHYVTIMNSQLCMGLVVASWVGGFAHSIVQLSLMLPLPFCGPNVLDNFYCDVPQVLRLACMDTSLLEFLMISNSGMLDVIWFFLLLISYLVILVMLRSHSGEARRKAASTCTTHIIVVSMIFIPSIYLYARPFTPFTMDKAVSISHTVLTPMLNPMIYTLRNQEMQAAMKRLAKRLALCNRE

SEQ ID NO: 1386 - protein, 311 aa, Artificial Sequence
  Synthetic
MEPGNLTWVSEFVFLGFSEIWELQVFLFVVFLCVYSTTVVGNLLIIVTVSSDPRLHTPMYFLLRNLAVLDLCFSSVTAPKMLVDFLSEKKTISYRGCMVQIFFFHFLGGAMVFFLSVMAYDRLVAISRPLHYVTIMNSQLCMGLVVASWVGGFAHSIVQLSLMLPLPFCGPNVLDNFYCDVPQVLRLACMDTSLLEFLMISNSGMLDVIWFFLLLISYLVILVMLRSHSGEARRKAASTCTTHIIVVSMIFIPSIYLYARPFTPFTMDKAVSISHTVMTPMLNPMIYTLRNQEMQAAMKRLAKRLALCNRE

SEQ ID NO: 1387 - protein, 311 aa, Artificial Sequence
  Synthetic
MEPGNRTWVSEFVFLGFSEIWELQVFLFVVFLCVYSTTVVGNLLIIVTVSSDPRLHTPMYFLLRNLAVLDLCFSSVTAPKMLVDFLSEKKTISYRGCMAQVFFFHFLGGAMVFFLSVMAYDRLVAISRPLHYVTIMNTQHCVVLVVTAWIVGFVHSIVQLSLMLPLPFCGPNVLDNFYCDVPQVLRLACTDTSLLEFLMISNSGMLDVIWFFLLLISYLVILVMLRSHSGEARRKAASTCTTHIIVVSMIFIPSIYLYARPFTPFTMDKAVSISHTVMTPMLNPMIYTLRNQEMQAALKRLGMHLLVCRKE

SEQ ID NO: 1388 - protein, 307 aa, Artificial Sequence
  Synthetic
METGNLTWVSDFVFLGLSQTRELQRFLFLMFLFVYITTVMGNILIIITVTSDSQLHTPMYFLLRNLAVLDLCFSSVTAPKMLVDLLSEKKTISYQGCMGQIFFFHFLGGAMVFFLSVMAFDRLIAISRPLRYVTVMNTQLWVGLVVATWVGGFVHSIVQLALMLPLPFCGPNILDNFYCDVPQVLRLACTDTSLLEFLKISNSGLLDVVWFFLLLMSYLFILVMLRSHPGEARRKAASTCTTHIIVVSMIFVPSIYLYARPFTPFPMDKLVSIGHTVMTPMLNPMIYTLRNQDMQAAVRRLGRHRLV

SEQ ID NO: 1389 - protein, 307 aa, Artificial Sequence [sequence omitted]

SEQ ID NO: 1390 - protein, 313 aa, Artificial Sequence
  Synthetic
MEMENYTRIKELIFLGLTQSQQVSAVLFLFLLLVYVTTLLGNLLIMVTVTCESRLHTPMYFLLRNLSVADICFSSITAPKVLVDLTSNRKTISFNGCLTQMFFFHLIGGVDAFSLSVMALDRYVAISKPLHYVTIMSRGRCIGLIVASWVGGFAHSIVQISLLLTLPFCGPNVLDTFYCDVPQVIKLACTDIVVLELLMISNNGMLTTLWFFLLLVSYMVILLLLKSQSGEGKKKAISTCTTHITVVTLHFVPCIYVYARPFTALPTDKVISVTFTVISPLLNPLIYTLRNQEMKSAMRRLRKKFRFSHWIEK

SEQ ID NO: 1391 - protein, 311 aa, Artificial Sequence
  Synthetic
MENYTRVKELIFLGLTQSQEVSMVLFLFLLLVYVTTLLGNLLIMVTVTCESRLHTPMYFLLRNLSVADICFSSITAPKVLVDLLSDRKTISFNGCLTQMFFFHLIGGVDVFSLSVMALDRYVAISKPLHYVTIMSRGRCIGLIVASWVGGFAHSIVQISLLLTLPFCGPNVLDTFYCDVPQVIKLACTDIFVLELLMISNNGMLTTLWFFLLLVSYMVILLLLKSQSGEGKKKAISTCTSHITVITLHFVPCIYVYARPFTALPTDKAISVTFTVISPLLNPLIYTLRNQEMKSAMRRLRKRLGPSYWIER

SEQ ID NO: 1392 - protein, 311 aa, Artificial Sequence
  Synthetic
MENYTRVKELIFLGLTQSQEVSMVLFLFLLLVYVTTLLGNLLIMVTVTCESRLHTPMYFLLRNLSVADICFSSITAPKVLVDLLSDRKTISFNGCLTQMFFFHLIGGVDVFSLSVMALDRYVAISKPLHYVTIMSRGRCIGLIVASWVGGFAHSIVQISLLLTLPFCGPNVLDTFYCDVPQVIKLACTDIFVLELLMISNNGLVATLWFVLLVVSYTVILMMLRSHSGEGRKKAISTCTSHITVVTLHFVPCIYVYARPFTALPTDKAISVTFTVISPLLNPLIYTLRNQEMKSAMRRLRKRLEPFDREEQ

SEQ ID NO: 1393 - protein, 311 aa, Artificial Sequence; identical to SEQ ID NO: 1392
  Synthetic

SEQ ID NO: 1394 - protein, 311 aa, Artificial Sequence
  Synthetic
MEMENCTRVKEFIFLGLTQNREVSLVLFLFLLLVYVTTLLGNLLIMVTVTCESRLHTPMYFLLHNLSIADICFSSITVPKVLVDLLSERKTISFNHCFTQMFLFHLIGGVDVFSLSVMALDRYVAISKPLHYATIMSRDHCIGLTVAAWLGGFVHSIVQISLLLPLPFCGPNVLDTFYCDVHRVLKLAHTDIFILELLMISNNGLLTTLWFFLLLVSYIVILSLPKSQAGEGRRKAISTCTSHITVVTLHFVPCIYVYARPFTALPMDKAISVTFTVISPLLNPLIYTLRNHEMKSAMRRLKRRLVPSDRK

SEQ ID NO: 1395 - protein, 311 aa, Artificial Sequence; identical to SEQ ID NO: 1394
  Synthetic

SEQ ID NO: 1396 - protein, 310 aa, Artificial Sequence
  Synthetic
MELRNDTRVKEFIFLGLTQSQHLSLVLCLVLCFVYVTTLLGNLLIMIIVTFESRLHTPMYFLLRNLAVLDICFSSITAPKVLVDLLAKKKTISYAKCMTQMFFFHLLGGADIFSLSVMAFDRYMAISKPLHYVTIMSSKRCTALIAASWVGGFVHSIVQISLLLPLPFCGPNVLDTFYCDVPQVLKLACTDTFVLELLMISNNGLVTTLWFIFLLVSYMVILMMLRSQAGEDRRKAISTCTSHITVVTLHFVPCIYVYARPFTALPTDKAISVTFTVISPLLNPLIYTLRNQEMKSAIRRLKRKLTPLEK

SEQ ID NO: 1397 - protein, 311 aa, Artificial Sequence
  Synthetic
MELGNVTRVKEFIFLGLTQSQDQSLVLFLFLCLVYMTTLLGNLLIMVTVTCESRLHTPMYFLLRNLAILDICFSSTTAPKVLLDLLSKKKTISYTSCMTQIFLFHLLGGADIFSLSVMAFDCYMAISKPLHYVTIMSRGQCTALISASWMGGFVHSIVQISLLLPLPFCGPNVLDTFYCDVPQVLKLTCTDTFALEFLMISNNGLVTTLWFIFLLVSYTVILMTLRSQAGGGRRKAISTCTSHITVVTLHFVPCIYVYARPFTALPTEKAISVTFTVISPLLNPLIYTLRNQEMKSAMRRLKRRLVPSERE

SEQ ID NO: 1398 - protein, 311 aa, Artificial Sequence; identical to SEQ ID NO: 1397
  Synthetic

SEQ ID NO: 1399 - protein, 314 aa, Artificial Sequence
  Synthetic
MDQRNYTRVKEFTFLGITQSRELSQVLFTFLFLVYMTTLMGNFLIMVTVTCESHLHTPMYFLLRNLSILDICFSSITAPKVLIDLLSETKTISFSGCVTQMFFFHLLGGADVFSLSVMAFDRYIAISKPLHYMTIMSRGRCTGLIVASWVGGFVHSIAQISLLLPLPFCGPNVLDTFYCDVPQVLKLACTDTFTLELLMISNNGLVSWFVFFFLLISYTVILMMLRSHTGEGRRKAISTCTSHITVVTLHFVPCIYVYARPFTALPTDTAISVTFTVISPLLNPIIYTLRNQEMKLAMRKLKRRLGQSERILIQ

SEQ ID NO: 1400 - protein, 314 aa, Artificial Sequence; identical to SEQ ID NO: 1399
  Synthetic

SEQ ID NO: 1401 - protein, 311 aa, Artificial Sequence
  Synthetic
MELGNHTKVTEFIFCGLTQSQELSLLLFFFLSIVYITTVLVNVTIMVTVTWESRLHTPMYFLLRNLSVLDICFSSITVPKVLVDLLSRRKTISFNGCFTQIFFFHLLGGADIFSLSVMAFDRYMAIFRPLHYVTIMSRGRCTALIAASWVGGFVHSIVQIFLLLPLPFCGPNVVDSFYCDVPQVLKLACTDTFVLELLMISNNGLITTLWFVLLLVSYTVILTMLRSHTGEGRKKAISTCTSHITVVTLHFVPCIYVYARPFTALPMDRAVSITLNIIVPVLNPMIYTLRNQEMKSAMKRLRKRLILSEVE

SEQ ID NO: 1402 - protein, 312 aa, Artificial Sequence
  Synthetic
MDQINHTNVKEFFFLELTRSRELEFFLFVVFFAVYVATVLGNALIVVTITCESRLHTPMYFLLRNKSVLDIVFSSITVPKFLVDLLSDRKTISYNDCMAQIFFFHFAGGADIFFLSVMAYDRYLAIAKPLHYVTMMRKEVWVALVVASWVSGGLHSIIQVILMLPFPFCGPNTLDAFYCYVLQVVKLACTDTFALELFMISNNGLVTLLWFLLLLGSYTVILVMLRSHSGEGRNKALSTCTSHMLVVTLHFVPCVYIYCRPFMTLPMDTTISINNTVITPMLNPIIYSLRNQEMKSAMQRLQRRPSESRKWG

SEQ ID NO: 1403 - protein, 312 aa, Artificial Sequence
  Synthetic
MDQINHTNVKEFFFLELTRSRELEFFLFVVFFAVYVATVLGNALIVVTITCESRLHTPMYFLLRNKSVLDIVFSSITVPKFLVDLLSDRKTISYNGCMAQIFFFHFAGGADIFFLSVMAYDRYLAIAKPLHYVTMMRKEVWVALVVASWVSGGLHSIIQVILMLPFPFCGPNTLDAFYCYVLQVVKLACTDTFALELFMISNNGLVTLLWFLLLLGSYTVILVMLRSHSGEGRNKALSTCTSHMLVVTLHFVPCVYIYCRPFMTLPMDTTISINNTVITPMLNPIIYSLRNQEMKSAMQRLQRRPSESRKWG

SEQ ID NO: 1404 - protein, 312 aa, Artificial Sequence
  Synthetic
MSQINHTNVKEFVFLALTRIRELEFFLFSVFFLVYVTTVLGNTLIVVTITAESRLHTPMYFLLRNKSILDIVFSSITVPKFLVDLLSERKAISYNGCLTQIFFFHFAGGADIFFLSVMAYDRYLAIAKPLHYVTIMRREVWLALVVASWVGGGLHSIVQIILMLPLPFCGPNTLDAFYCDVPQVVKLACTDTFALELLMISNNGLVTLLWFFLLLGSYTIILVMLRFHSGEGRNKALSTCTSHIMVVTLHFVPCVYIYCRPFTTLPMDTAISINNTVITPMLNPMIYTLRNQEMKSAMKRLQRRPSESNKLG

SEQ ID NO: 1405 - protein, 316 aa, Artificial Sequence
  Synthetic
MNPANHSQVAGFVLLGLSQVWELRFVFFTVFSAVYFMTVVGNLLIVVIVTSDPHLHTTMYFLLGNLSFLDFCYSSITAPRMLVDLLSGNPTISFGGCLTQLFFFHFIGGIKIFLLTVMAYDRYIAISQPLHYTLIMNQTVCALLMAASWVGGFIHSIVQIALTIQLPFCGPDKLDNFYCDVPQLIKLACTDTFVLELLMVSNNGLVTLMCFLVLLGSYTALLVMLRSHSREGRSKALSTCASHIAVVTLIFVPCIYVYTRPFRTFPMDKAVSVLYTIVTPMLNPAIYTLRNKEVIMAMKKLWRRKKDPIGPLEHRP

SEQ ID NO: 1406 - protein, 316 aa, Artificial Sequence; identical to SEQ ID NO: 1405
  Synthetic

SEQ ID NO: 1407 - protein, 314 aa, Artificial Sequence
  Synthetic
MNPANHSQVATFFLLGLSQVWELRFLFFTVFSAVYLLTVTGNLLIVAIVTSDPRLHTTMYFLLGNLSFLDFCYSSITAPRMLVDLLSHSPTISFGACLTQLFFFHFIGGIKIFLLTVMAYDRYIAISQPLRYTLIMNQTVCGIFMAASWVGGFIHSIVQVGLTIHLPFCGPDKLDNFYCDVPQLIKLACTDTFVLELLMVSNNGLVTLMCFLVLLGSYTALLVMLRSHSKEGRSKALSTCASHITVVTIIFVPCIYIYARPFRTFPMDKAVSVLYTMVTPMLNPAIYTLRNKEVIVAMKKLWRRKKDFLGSSDH

SEQ ID NO: 1408 - protein, 312 aa, Artificial Sequence
  Synthetic
MDLKNGSLVTEFILLGFFGRWELQIFFFVTFSLIYGATVMGNILIMVTVTCRSTLHSPLYFLLGNLSFLDMCLSTATTPKMIIDLLTDHKTISVWGCVTQMFFMHFFGGAEMTLLIIMAFDRYVAICKPLHYRTIMSHKLLKGFAILSWIIGFLHSISQIVLTMNLPFCGHNVINNIFCDLPLVIKLACIETYTLELFVIADSGLLSFTCFILLLVSYIVILVSVPKKSSHGLSKALSTLSAHIIVVTLFFGPCIFIYVWPFSSLASNKTLAVFYTVITPLLNPSIYTLRNKKMQEAIRKLRFQYVSSAQNF

SEQ ID NO: 1409 - protein, 312 aa, Artificial Sequence
  Synthetic
MDLKNGSLVTEFILLGFFGRWELQIFFFVTFSLIYGATVMGNILIMVTVTCSSTLHSPLYFLLGNLSFLDMCLSTATTPKMIIDLLTDHKTISVWGCVTQMFFMHFFGGAEMTLLIIMAFDRYVAICKPLHYRTIMSHKLLKGFAILSWIIGFLHSISQIVLTMNLPFCGHNVINNIFCDLPLVIKLACIETYTLELFVIADSGLLSFTCFILLLVSYIVILVSVPKKSSHGLSKALSTLSAHIIVVTLFFGPCIFIYVWPFSSLASNKTLAVFYTVITPLLNPSIYTLRNKKMQEAIRKLRFQYVSSAQNF

SEQ ID NO: 1410 - protein, 309 aa, Artificial Sequence
  Synthetic
MDYENGSAVTEFILVGFSRDWQLQIFFFVTFTLIYGATVVGNILIIVTVAANSALHSPMYFLLGNLSFLDMCLSTVTTPKMITDLLAAHKSISFQGCMVQMFFSHFFGGAEMTLLIVMAFDRYVAICKPLHYRIIMSHRLLNRFIILSWTIGFIHTMSQMALTVNLPFCGHNIINNIFCDLPLVIKLACIETYTLELFVIADSGLLSFISFFLLLVSYTVILLIVKHKSPGSLSKALSTLSAHIIVVTLFFGPCIFIYAWPFGSFASNTTLAVFYTVITPLLNPIIYTLRNQEMKKAMRKLWNQQVSCR

SEQ ID NO: 1411 - protein, 309 aa, Artificial Sequence
  Synthetic
MDYENGSAVTEFILVGFSGNWQLQIFFFVTFTLIYGATVVGNILIIVTVAANSALHSPMYFLLGNLSFLDMCLSTVTTPKMISDLLAAHKSISFQGCMVQMFFMHFLGGAEMTLLIVMAFDRYVAICKPLHYRIIMSHKLLNRFIILSWTIGFIHTMSQMALTVNLPFCGHNIINNIFCDLPLVIKLACIETYTLELFVIADSGLLSFISFFLLLVSYTVILLIVKHKSPGSLSKALSTLSAHIIVVTLFFGPCIFIYAWPFGSFASNTTLAVFYTVITPLLNPIIYTLRNQEMKKAMRKLWIQQVSCT

SEQ ID NO: 1412 - protein, 309 aa, Artificial Sequence
  Synthetic
MDYKNGSAVTEFILVGFSGNWQLQIFFFVTFTLIYGATVVGNILIIVTVAANSALHSPMYFLLGNLSFLDMCLSTVTTPKMISDLLAAHKSISFQGCMVQMFFSHFLGGAEMTLLIVMAFDRYVAICKPLHYRIIMSHRLLNRFIILSWTIGFIHTMSQMALTVNLPFCGHNIINNIFCDLPLVIKLACIETYTLELFVIADSGLLSFISFFLLLVSYTVILLIVKHKSPGSLSKALSTLSAHIIVVTLFFGPCIFIYAWPFGSFASNTTLAVFYTVITPLLNPIIYTLRNQEMKKAMRKLWNQQVSCR

SEQ ID NO: 1413 - protein, 304 aa, Artificial Sequence
  Synthetic
MERANHSVVSEFILLGLSKSQNLQILFFLGFSVVFVGIVLGNLLILVTVTFDSLLHTPMYFLLSNLSCIDMILASFATPKMIVDFLRERKTISWWGCYSQMFFMHLLGGSEMMLLVAMAIDRYVAICKPLHYMTIMSPRVLTGLLLSSYAVGFVHSSSQMAFMLTLPFCGPNVIDSFFCDLPLVIKLACKDTYILQLLVIADSGLLSLVCFLLLLVSYGVIIFSVRYRAASRSSKAFSTLSAHITVVTLFFAPCVFIYVWPFSRYSVDKILSVFYTIFTPLLNPIIYTLRNQEVKAAIKKRLCI

SEQ ID NO: 1414 - protein, 303 aa, Artificial Sequence
  Synthetic
MERANHSVVSEFILLGLSKSQNLQILFFLGFSVVFVGIVLGNLLILVTVTFDSLLHTPMYFLLSNLSCIDMILASFATPKMIVDFLRERKTISWWGCYSQMFFMHLLGGSEMMLLVAMAIDRYVAICKPLHYMTIMSPRVLTGLLLSSYAVGFVHSSSQMAFMLTLPFCGPNVIDSFFCDLPLVIKLACKDTYILQLLVIADSGLLSLVCFLLLLVSYGVIIFSVRYRAASRSSKAFSTLSAHITVVTLFFAPCVFIYVWPFSRYSVDKILSVFYTIFTPLLNPIIYTLRNQEVKAAIKRLCI

SEQ ID NO: 1415 - protein, 309 aa, Artificial Sequence
  Synthetic
MDPQNYSLVSEFVLHGLCTSRHLQNFFFIFFFGVYVAIMLGNLLILVTVISDPCLHSPMYFLLGNLAFLDMWLASFATPKMIRDFLSDQKLISFGGCMAQIFFLHFTGGAEMVLLVSMAYDRYVAICKPLHYMTLMSWQTCIRLVLASWVVGFVHSISQVAFTVNLPYCGPNEVDSFFCDLPLVIKLACMDTYVLGIIMISDSGLLSLSCFLLLLISYTVILLAIRQRAAGSTSKALSTCSAHIMVVTLFFGPCIFVYVRPFSRFSVDKLLSVFYTIFTPLLNPIIYTLRNEEMKAAMKKLQNRRVTFQ

SEQ ID NO: 1416 - protein, 309 aa, Artificial Sequence; identical to SEQ ID NO: 1415
  Synthetic

SEQ ID NO: 1417 - protein, 316 aa, Artificial Sequence
  Synthetic
MNETNHSRVTEFVLLGLSSSRELQPFLFLTFSLLYLAILLGNFLIILTVTSDSRLHTPMYFLLANLSFIDVCVASFATPKMIADFLVERKTISFDACLAQIFFVHLFTGSEMVLLVSMAYDRYVAICKPLHYMTVMSRRVCVVLVLISWFVGFIHTTSQLAFTVNLPFCGPNKVDSFFCDLPLVTKLACIDTYVVSLLIVADSGFLSLSSFLLLVVSYTVILVTVRNRSSASMAKARSTLTAHITVVTLFFGPCIFIYVWPFSSYSVDKVLAVFYTIFTLILNPVIYTLRNKEVKAAMSKLKSRKPSQVSVVIRNV

SEQ ID NO: 1418 - protein, 316 aa, Artificial Sequence
  Synthetic
MNETNYSRVTEFVLLGLSSSKELQPFLFLIFSLLYLAILLGNFLIILTVTSDPRLHTPMYFLLANLSFIDMCVASFATPKMLADFLVERKTISFEACLAQIFFVHLFTGGEMVLLVSMAYDRYVAICKPLHYMTIMSRRVCIILVCISWFVGFIHTTSQLAFTVNLPFCGPNKVDSFFCDLLLVTKLACIDTYVVSLLIVADSGFLSMSSFLLLVVSYTVILITVRNRSSASMAKARSTLTAHITVVVLFFGPCIFIYVWPFSSYSVDKVLAVFYTIFTPILNPVIYTLRNKEVKAAMSKLRGRYLKPGQVSALIR

SEQ ID NO: 1419 - protein, 316 aa, Artificial Sequence
  Synthetic
MNETNYSRVTEFVLLGLSSSKELQPFLFLIFSLLYLAILLGNFLIILTVTSDSRLHTPMYFLLANLSFIDMCVASFATPKMLADFLVERKTISFEACLAQIFFVHLFTGGEMVLLVSMAYDRYVAICKPLHYMTIMSRRVCIILVCISWFVGFIHTTSQLAFTVNLPFCGPNKVDSFFCDLPLVTKLACIDTYVVSLLIVADSGFLSMSSFLLLVVSYTVILITVRNRSSASMAKARSTLTAHITVVVLFFGPCIFIYVWPFSSYSVDKVLAVFYTIFTPILNPVIYTLRNKEVKAAMSKLRGRKPGQVSALIRNV

SEQ ID NO: 1420 - protein, 314 aa, Artificial Sequence
  Synthetic
MNERNYSRVTEFVLLGLSSSKELQPFLFLIFSLLYLAILLGNFLIILTVTSDSRLHTPMYFLLANLSFIDMCVASFATPKMLADFLVERKTISFEACLAQIFCVHQFAGGEMVLLVSMAYDRYVAICKPLHYMTIMSRRVCITLVIIPWFVGFIHTMSQLAFTVNLPFCGPNQVDSFFCDLPLVTKLACTDTYFVSLLIVADSGVLTLSTFVFLVISYTVILITVRNRSSASMAKARSTLTAHITVVVLFFGPCIFIYAWPFNGYSVDKVLAVFYTIFTPILNPLIYTLRNKEVKAAMSKLRGRYLKPGQVSEL

SEQ ID NO: 1421 - protein, 315 aa, Artificial Sequence
  Synthetic
MDKSNSSVVSEFVLLGLCSSQKLQLFYFCFFSVLYTVIVLGNLLIILTVTSDTSLHSPMYFLLGNLSFVDICQASFATPKMIADFLSAHETISFSGCIAQIFFIHLFTGGEMVLLVSMAYDRYVAICKPLYYVVIMSRRTCTVLVMISWAVSLVHTLSQLSFTVNLPFCGPNVVDSFFCDLPRVTKLACLDSYIIEILIVVNSGILSLSTFSLLVSSYIIILVTVLKSSAAMAKAFSTLASHIAVVILFFGPCIFIYVWPFTISPLDKFLAIFYTVFTPVLNPIIYTLRNRDMKAAVRKIVNHYLRPRRISEMSL

SEQ ID NO: 1422 - protein, 315 aa, Artificial Sequence; identical to SEQ ID NO: 1421
  Synthetic

SEQ ID NO: 1423 - protein, 315 aa, Artificial Sequence
  Synthetic
MDNTNYSVVSEFVLLGLSSSRELQIFYFVFFSMLYIVIILGNLLIIIAVTSDSSLHSPMYFLLGNLSFFDICQASFATPKMIVDFLSEHKTISFSGCIAQIFFIHLFTGGEMVILVSMAYDRYVAICKPLHYMTIMNQTTCTALVVISWAVGLVHTLSQLSFTVKLSFCGPNEVDSFFCDLPRVVKLACIDSYITEILIVVNSGILSLSTFSLLVSSYVIILVTVFKSSAAMAKAFSTLAAHIMVVVLFFGPCIFIYVWPFTTYPVDKILAIFYTVFTPILNPIIYTLRNRDMKAVMGKIAAHYLRPPKVAEMSF

SEQ ID NO: 1424 - protein, 311 aa, Artificial Sequence
  Synthetic
MAHTNESMVSEFVLLGLSNSWGLQLFFFAIFSIVYVTSVLGNVLIIVIISFDSHLNSPMYFLLSNLSFIDICQSNFATPKMLVDFFIERKTISFEGCMAQIFVLHSFVGSEMMLLVAMAYDRFIAICKPLHYSTIMNRRLCVIFVSISWAVGVLHSVSHLAFTVDLPFCGPNEVDSFFCDLPLVIELACMDTYEMEIMTLTNSGLISLSCFLALIISYTIILIGVRCRSSSGSSKALSTLTAHITVVILFFGPCIYFYIWPFSRLPVDKFLSVFYTVCTPLLNPIIYSLRNEDVKAAMWKLRNRHVNSWKN

SEQ ID NO: 1425 - protein, 311 aa, Artificial Sequence
  Synthetic
MAHNNESTVSEFVLLGLSKSWGLQLVLFTIFFVIYVTSVLGNIMIIVIIFSDSHLNSPMYFLLSNLSFIDICQSNFATPKMLVDFFVEYKTISFEGCMAQIFLLHSFVGSEMMLLVAMGYDRFVAICKPLHYNLIMNRRVCIIFVSISWAVGILHSVSHLAFTVNLPFCGPNEVDSFFCDLPLVIKLACMDTYRMEILTLANSGMISLSCFLALIISYIIILVSVQRQSSSGSSKALSTLTAHITVVILFFGPCIYFYIWPFSRLSVDKFLSVFYTICTPLLNPIIYSLRNEDVKSALRKLRNSHINPGKN

SEQ ID NO: 1426 - protein, 316 aa, Artificial Sequence
  Synthetic
RMEAMKLLNQSQVSEFILLGLTSSQDVEFLLFALFSVIYVVTVLGNLLIIVTVFNTPNLNTPMYFLLGNLSFVDMTLASFATPKVILNLLKKQKVISFAGCFTQIFLLHLLGGVEMVLLVSMAFDRYVAICKPLHYMTIMNKKVCVLLVVTSWLLGLLHSGFQIPFAVNLPFCGPNVVDSIFCDLPLVTKLACIDIYFVQVVIVANSGIISLSCFIILLISYSLILITIKNHSPTGQSKARSTLTAHITVVILFFGPCIFIYIWPFGNHSVDKFLAVFYTIITPILNPIIYTLRNKEMKISMKKLWRAFVNSREDT

SEQ ID NO: 1427 - protein, 312 aa, Artificial Sequence
  Synthetic
MKLLNQSQVSEFILLGLTSSQDVEFLLFALFSVIYVVTVLGNLLIIVTVFNTPNLNTPMYFLLGNLSFVDMTLASFATPKVILNLLKKQKVISFAGCFTQIFLLHLLGGVEMVLLVSMAFDRYVAICKPLHYMTIMNKKVCVLLVVTSWLLGLLHSGFQIPFAVNLPFCGPNVVDSIFCDLPLVTKLACIDIYFVQVVIVANSGIISLSCFIILLISYSLILITIKNHSPTGQSKARSTLTAHITVVILFFGPCIFIYIWPFGNHSVDKFLAVFYTIITPILNPIIYTLRNKEMKISMKKLWRAFVNSREDT

SEQ ID NO: 1428 - protein, 316 aa, Artificial Sequence
  Synthetic
MERLNHSRVPEFVLLGLTDSPELQIFFFVAFSIFYLMTMLGNCLILFTVLSTSHLHSPMFFLLSNLSLIDICLSSFATPKMIMDFFAHHKTISFEGCISQIFLLHLFTGTEIVLLISMSFDRYIAICKPLYYSTIMSQKVCVGLVIASWTVGFLHTMSQLVFILYLPFCGPNVVDSFFCDLPLVIQLACIDTYVLGVFMVATSGVIALISFLLLLISYIVVLVTIRGHSSIGSSKALSTCTSHFTVVLMFFGPCILIYVWPFTNFLMDKILSVFYTIFTPFLNPLIYTLRNQEVRTAVKKISNQSFGKINPHYTVK

SEQ ID NO: 1429 - protein, 319 aa, Artificial Sequence
  Synthetic
KSEQMAWSNQSAVTEFILRGLSSSLELQIFYFLFFSIVYAATVLGNLLIVVTIASEPHLHSPTYFLLGNLSFIDMSLASFATPKMIADFLREHKAISFEGCMTQMFFLHLLGGAEIVLLISMSFDRYVAICKPLHYLTIMSRRMCVGLVILSWIVGIFHALSQLAFTVNLPFCGPNEVDSFFCDLPLVIKLACVDTYILGVFMISTSGMIALVCFILLVISYTIILVTVRQRSSGGSSKALSTCSAHFTVVTLFFGPCTFIYVWPFTNFPIDKVLSVFYTIYTPLLNPVIYTVRNKDVKYSMRKLSSHIFKSRKTDHTP

SEQ ID NO: 1430 - protein, 314 aa, Artificial Sequence
  Synthetic
MDVGNKSTMSEFVLLGLSNSWELQMFFFMVFSLLYVATMVGNSLIVITVIVDPHLHSPMYFLLTNLSIIDMSLASFATPKMITDYLTGHKTISFDGCLTQIFFLHLFTGTEIILLMAMSFDRYIAICKPLHYASVISPQVCVALVVASWIMGVMHSMSQVIFALTLPFCGPYEVDSFFCDLPVVFQLACVDTYVLGLFMISTSGIIALSCFIVLFNSYVIVLVTVKHHSSRGSSKALSTCTAHFIVVFLFFGPCIFIYMWPLSSFLTDKILSVFYTIFTPTLNPIIYTLRNQEVKIAMRKLKNRFLNFNKAMPS

SEQ ID NO: 1431 - protein, 314 aa, Artificial Sequence; identical to SEQ ID NO: 1430
  Synthetic

SEQ ID NO: 1432 - protein, 317 aa, Artificial Sequence
  Synthetic
MMNVANKSVVTEFVLLGLSNSWELQIFFFIVFSLFYVATMVSNSMIVLIVISDSHLHSAMYFLLTNLSIIDMSLASFATPKMIIDYLTDHKTISFDGCIAQIFFLHLFTGTEIILLMAMSFDRYIAICKPLRYASIISPQVCIAFVVSSWVVGTMHSMSQVIFALTLPFCGPNKIDSFFCDLPVVFQLSCVDTYVLGLFMISTSGIIALSCFILLFNSYIIVLVTIKHHSSKGSSKALSTCTAHFIVVFMFFGPCIFIYMWPQNSFVIEKILSVFYTIFTPIMNPVIYTLRNHEVNSAMRKLRSKFLNFSTETPSHS

SEQ ID NO: 1433 - protein, 312 aa, Artificial Sequence
  Synthetic
MDGGNRSVVSEFILQGLSHSKNIQVLLFVIFLMLYLFIVSGNIVILTLITTDPHLHSPMYFLLANLSFVDMCLSSNITPKMITDFLRENKTISFAGCMSQVFFTHCIAGGEMILLVVMAYDRYVAICKPLHYFTIMNLKRCTGLVLTSWTIGFIHGISYLVVFVHLPFCGPKEIDSFFCDMPLIIKLACMDSHNLNTLMNAECGVVVVTCFSLLLISYTYILVTVSKSSKAGASKALSTCSAHITVVMIFFVPCIFIYVWPLSITWFDKFLAVFYSVITPLLNPTIYTLRNKEIKNAMKRFIGKFLGPKRNS

SEQ ID NO: 1434 - protein, 312 aa, Artificial Sequence
  Synthetic
MDGDNQTVVSEFILWGLAHSKNIQVLLFVIFLMLYLLIMSGNIVILTLITTDTHLHSPMYFLLANLSFVDMWLSTNTTPKMITDFLREIKIISFAGCMSQVFFSHCIAAGEMVLLVAMAYDRYVAICKPLHYFTIMNLKRCSSLVLTSWTIGFIHGIIYIVVIVHLPFCGPNEIDSFFCDMPLVIKLACMDYHYLNTLMNADCGLVAITCFILLLTSYTYILMTVCKSSKAGASKAMNTCTAHITVVLIFFVPCIFIYVWPLNITWLDKFFAVFYSVFTPLLNPAIYTLRNKEMKNAMKRFIGNFLGPKVNL

SEQ ID NO: 1435 - protein, 312 aa, Artificial Sequence
  Synthetic
MDGDNQTVVSEFVLLGLSNSKNLQVLLFLIFLLLYLLIMSGNIVIQILITTDPHLHSPMYFLLANLSFVDMLLSSNTTPRMIIDFFREKKTISFAGCMSQIFFSHCIASGEVVLLALMAYDRYVAICKPLHYFTIMNLKRCTGLVLTSWTIGFLHGISHVVVLLQLPFCGPNKIDSFFCDMPLVIKLACMDSQDLNTLMNGECGILAVTCFILLLISYTYILITVHQNSKTGASKALSTCTAHITVVMIFFLPCFFIYVFPLNITWLDKFLAVFYSVITPLLNPVIYTLRNKEMKNAMKRFIGKFLRAKGNS

SEQ ID NO: 1436 - protein, 312 aa, Artificial Sequence
  Synthetic
MDRDNQTVLSEFVLLGLSNSKNLQVLLFLIFLLLYLLIMSGNIIIQILITTDPHLHSPMYFLLANLSFVDMWLSSNTTPKMIIDFLSENKTISFAGCMSQVFLSHCIAGGEMVLLVVMAYDRYVAICKPLHYFTIMNLKRCTGLVLTSWTIGFIHGISYFLVVVQLPFCGPNKIDSFFCDMPLVIKLACMDSHDLNTLMNAECGVVAVTCFMLLLFSYTYILITVRQTSKNGASKALSTCTAHITVVMIFFLPCMFIYVWPLSITWLDKFLAVFYSVFTPLLNPAIYTLRNKEMKNAMKRFIGKFLCPKGNS

SEQ ID NO: 1437 - protein, 315 aa, Artificial Sequence
  Synthetic
MSKMDGGNHSLVSEFVLLGLAHSQNIQALLFMIFLMLYLLIVSGNIVIMVLITTDPHLHSPMYFLLANLSFVDMWLSSVTTPKMITDFFRENKTISFSGCMSQVFFAHCIAAGEMVLLVVMAYDRYVAICKPLHYFTIMNLKRCTGLVLTSWTIGFVHALSHLVVIVELPFCSAKEIDSFFCDMPLVIKLACMDSHNLDILMYADCGVVGVTCFILLLISYTYILITVRRSSKAGASKALSTCTAHITVVMIFFVPCIFIYVWPLNITWLDKFLAVFYSVFTPLLNPAIYTLRNKEMKNAMRRFINNYMDSQGKS

SEQ ID NO: 1438 - protein, 312 aa, Artificial Sequence
  Synthetic
MDEGNHTMVSEFILWGLSSSQRIEVLLFMVFSMLYLLIVSGNIVILVLITTDPHLHSPMYFLLANLSFIDMWLSSVTTPKMITDFLRENKTISFAGCMSQVFFAHCIAAGEMVLLVIMAYDRYVAICKPLHYFTIMNMKRCTGLVFTSWTTGFVHALSHLVVIVELPFCGPKEIDSFFCDMPLVIKLACIDSRDLDVLMNADCGLVAVTCFILLLISYTYILITVCQSSKAGASKAMNTCTAHITVVLIFFVPCIFIYVWPLNITWLDKFLAVFYSVFTPLLNPAIYTLRNKEMKNAMKRFISNYLSHKGNL

SEQ ID NO: 1439 - protein, 310 aa, Artificial Sequence
  Synthetic
MNGVNESTVSEFVLLGLSRSQNLQVLLFVIFLILYLLIISGNIVIMILITIDRHLHSPMYFLLANLSFVDIWLSSVTTPKMVIDFLREHKTISFEGCMSQVFFAHCIAAGEMVLLLVMAYDRYVAICKPLHYFTIMNLKRCTGLVLTSWTVGFVHALSQLVAVLQLPLCGPLEIDSFFCDMPLVIKLACTDSHDLDILMNADCGIVVVSCFIMLLISYTYILITVRRSSKAGASKALSTCTAHITVVMLLFLPCIFIYVWPLNITWLDKFLAVFYSVVTPLLNPAIYTLRNKEIKNALKRFKSYNHKVNT

SEQ ID NO: 1440 - protein, 312 aa, Artificial Sequence
  Synthetic
MDGSNRSLVSEFVLLGLARSQNLQVLLFIIFLVVYLLILSGNTIVMFLIITDKNLHSPMYFFLANLSFVDMWLSSATTPKMITDFLKEPKIISFAGCMSQVFFDHCVGAVEMLLLVVMAYDRYVAICKPLHYFTIMSLKRCAGLVLTSWAIAFVHAMSQLLAVVQLPLCGHMEIDSFFCDIPLIIKLACMDSHILDIYMNVDCGFVVVTCFILLLISYTYILLTVRQSSKAGASKALSTCTAHITVVMIFFVPCIFIYVWPLSITWLDKFLAVFYTVFAPLLNPAIYTLRNKEMRNAVKKLKNHFMDYKGNT

SEQ ID NO: 1441 - protein, 304 aa, Artificial Sequence
  Synthetic
MEEANQTVVSEFIFQGLCASKELQILLLLPFSTLYMMTVVGNLFVVILIIIDHHLHSPMYFLLANLSFIDFCLSSVTTPKLITDLLKDNKTISFGGCMSQILCVHFFGGGEMVLLVTMAYDRYVAICRPLHYSSIMDRQKCIWLVVISWTIGFIHAMSQLILILDLPFCGPRVIDSFFCDIPLVMKLACMNTDTLGIVINADSGVLATTCFILLLISYTYILLTVQLHSKDGSSKALSTCTSHIIVVVLFFGPCIFIYLWPVSITWVDKFLAVFYTVITPLLNPAIYTLRNKDIKNAIKKLKNH

SEQ ID NO: 1442 - protein, 304 aa, Artificial Sequence; identical to SEQ ID NO: 1441
  Synthetic

SEQ ID NO: 1443 - protein, 304 aa, Artificial Sequence
  Synthetic
MEETNQTVVSEFIFQGICASKELQLFLLLPFSILYLMAVVGNLFVVILIIIDHHLHSTMYFLLANLSFIDFCLSSVTTPKLITDLLKDNKTISFGGCMSQILCVYFFGGSEMVLLVTMAYDRYVAICRPLHYSSIMGRQKCIWLVVISWTIGFIHAMSQLILILDLPFCGPRVIDSFFCDISLVMKLACMNTDTLEILINADSGVLATTCFILLLISYTNILLTVQLHSKDGSSKALSTCTSHIIVVLLFFGPVIFIYLCPVSITWVDNFLAVFYSVITPLLNPAIYTLRNKDIKNAIKKLINH

SEQ ID NO: 1444 - protein, 304 aa, Artificial Sequence
  Synthetic
MEEGNQTVVSEFIFQGLCASKELQLFLLLPFSILYLMAVVGNLFVVILIIIDHHLHSPMYFLLANLSFIDFCLSSVTTPKLITDLLKDNKTISFGGCMSQILCVHFFGGGEMVLLVTMAYDRYVAICRPLHYSSIMDRQKCIWLVVISWTIGFIHAMSQLILVLELPFCGPRVIDSFFCDIPLVMKLACMNTDTLEILINADSGVLATTCFILLLISYTYILLTVQLHSKDGSSKALSTCTSHIIVVLLFFGPVIFIYLWPVSITWVDKFLAVFYSVITPLLNPAIYTLRNKDIKNAIKKLINH

SEQ ID NO: 1445 - protein, 304 aa, Artificial Sequence
  Synthetic
MEDSNRTVSSEFIFQGLCSSRQLEIFLLLPFSILYLMAVVGNLFVVILIIIDHHLHSPMYFLLANLSFIDFCLSSVTTPKLTIDLLKENKTISFVGYMRQIVCVHFFAGGEMVLLVTMAYDRYVAICRPLHYSSIMDRQKCIWLVVISWIVGFVHAISQMLLILDLPFCGPRVIDSFFCDIPLVMKLACMNTDTLEILINADSGILATTCFILLLISYTYILLTVQHRSKDGSSKALSTCTSHIIVVLLFFGPIIFIYLWPVSITWVDKFLAVFYSVITPLLNPAIYTLRNKDIKNAIKKLISH

SEQ ID NO: 1446 - protein, 304 aa, Artificial Sequence
  Synthetic
MEDSNHTVASEFIFQGLCSSRQLEIFLLLPFSILYLMAVVGNLFVVILIIIDHHLHSPMYFLLANLSFIDFCLCSVTTPKLTIDLLKENKTISFVGCMSQIVCVHFFAGGEMVLLVTMAYDRYVAICRPLHYSSIMDRQKCIWFLVIPWIVGFVHAISQMLLILDLPFCGPRVIDSFFCDIPLVMKLACMNTDTLEILINADSGILATTCFILLLVSYTYILLTVQHRSKDGSSKALSTCTSHIIVVLLFFGPIIFIYLWPVSITWVDKFLAVFYSVITPLLNPAIYTLRNKDIKNAIKKLISH

SEQ ID NO: 1447 - protein, 304 aa, Artificial Sequence
  Synthetic
MEDSNQTVVSEFIFQGLCTSRQLEIFLLLPFSVLYLVTLVGNLFVVILIIIDHHLHSPMYFLLANLSFVDFCLSSVNTPKLTIDLLKENKTISFGGCMSQILCVHFFGGSEMVLLVTMAYDRYVAICRPLHYSSIMDRQKCIWLVVISWIVGFVHAISQLLLILDLPFCGPRVIDSFFCDIPLVMKLACMNTDTLEILINADSGILATSCFTLLLISYTYILLTVQHRSKDGSSKALSTCTSHIIVVLLFFGPIIFIYLWPVNITWVDKFLAVFYTVITPLLNPAIYTLRNKDIKNAIKKLTNH

SEQ ID NO: 1448 - protein, 303 aa, Artificial Sequence
  Synthetic
MEKINHSEISEFIILGLCDSWELQAFFLVIFTSLYLITIFGNIFIVVLIITDLHLHTPMYFLLANLSFIDFCLSSVTTPKMIIDFLKEIKTISFGGCMCQIFFGHFFGGGEMVLLVSMAYDRYVAICKPLHYSNIMSRHMCIGLVMASWMIGFVHSISQLVIIVNLPFCGSRVLDSFFCDIPLVIKLACLDIYVLEILINADSGVLAAICFVLLLVSYFHILTTVCLHSKDGASKALSTCTAHITVVVLFFGPCIFIYLWPVSITWVDKFLAVFYAVITPLLNPAIYTLRNKEIKTAMKRLQC

SEQ ID NO: 1449 - protein, 305 aa, Artificial Sequence
  Synthetic
MVTEFIFLGLSDSQELQTFLFMLFFVFYGGIVFGNLLIVITVVSDSHLHSPMYFLLANLSLIDLSLSSVTAPKMITDFFSQRKVISFKGCLVQIFLLHFFGGSEMVILIAMGFDRYIAICKPLHYTTIMCGNACVGIMAVTWGIGFLHSVSQLAFAVHLLFCGPNEVDSFYCDLPRVIKLACTDTYRLDIMVIANSGVLTVCSFVLLIISYTIILMTIQHRPLDKSSKALSTLTAHITVVLLFFGPCVFIYAWPFPIKSLDKFLAVFYSVITPLLNPIIYTLRNKDMKTAIRQLRKWDAHSSVKF

SEQ ID NO: 1450 - protein, 305 aa, Artificial Sequence
  Synthetic
MVTEFIFLGLSDSQELQTFLFMLFFVFYGGIVFGNLLIVITVVSDSHLHSPMYFLLANLSLIDLSLSSVTAPKMITDFFSQRKVISFKGCLVQIFLLHFFGGSEMVILIAMGFDRYIAICKPLHYTTIMCGNACVGIMAVAWGIGFLHSVSQLAFAVHLPFCGPNEVDSFYCDLPRVIKLACTDTYRLDIMVIANSGVLTVCSFVLLIISYTIILMTIQHCPLDKSSKALSTLTAHITVVLLFFGPCVFIYAWPFPIKSLDKFLAVFYSVITPLLNPIIYTLRNKDMKTAIRRLRKWDAHSSVKF

SEQ ID NO: 1451 - protein, 305 aa, Artificial Sequence [sequence omitted]

SEQ ID NO: 1452 - protein, 305 aa, Artificial Sequence
  Synthetic
MVTEFIFLGLSDSQGLQTFLFMLFFVFYGGIVFGNLLIVITVVSDSHLHSPMYFLLANLSLIDLSLSSVTAPKMITDFFSQRKVISFKGCLVQIFLLHFFGGSEMVILIAMGFDRYIAICKPLHYTTIMCGNACVGIMAVAWGIGFLHSVSQLAFAVHLPFCGPNEVDSFYCDLPRVIKLACTDTYRLDIMVIANSGVLTVCSFVLLIISYTIILMTIQHRPLDKSSKALSTLTAHITVVLLFFGPCVFIYAWPFPIKSLDKFLAVFYSVITPLLNPIIYTLRNKDMKTAIRQLRKWDAHSSVKF

SEQ ID NO: 1453 - protein, 296 aa, Artificial Sequence
  Synthetic
MGLSNSRELQIFLFAFFFVFYVGIVFGNLLIVITVTNDSHLHSPMYFLLANLSFIDLCVSSVTAPKTIADFFYKRKVISVKGCFTQIFLLHFFGGSEMVTLVAMAFDRYVAICKPLSYTTVMRGNVCVSIVATAWAIGFLHSVSQLAFAISLPFCGPNRVDSFYCDLPRVIKLACAETYRLDIMVIANSGVLSVCSFVLLIISYGIILMTIQRRPSDRSSKALSTLTAHITVVLLFFGPCIFIYAWPFPIKSLDKFLAVFYSVVTPLLNPIIYTLRNTEMKTAMRRLRQWSFWVKS

SEQ ID NO: 1454 - protein, 312 aa, Artificial Sequence
  Synthetic
MNEINYTEVSEFVFLGLSTSKHIQHFFLAFSVVFYVTIVLGNTLVVFTLAFDPHLHSPMYFLLGNLSFIDLCLSTLTVPKMISDLSSGHNTISFQGCVFQIFVLHVLGASEMVLLVAMAWDRYVAICKPLHYLTIMSPRMCLLLLSGAWIIGFLHSVAQLGFVVHLRFCGPNKIDSFYCDLPRFIKLACIDNYRMEFMVAANSGIISIGTFFLLIISYIVILFNVRKHSSGDLSKALSTLSAHISVVVLFFGPCIFVYMWPFPTVPVDKFLAILDFMITPILNPAIYTLRNKDMKVAMRKLSYQFLNFRKMS

SEQ ID NO: 1455 - protein, 313 aa, Artificial Sequence
  Synthetic
MFKKNYTKVSEFVFLGLSSSRKIRPFLLAFSMVLYVAIVLGNTLVVFTLAFDPHLHSPMYFLLGNLAFIDLCLSTLTVPKMISDLSSGHNAISFQGCVFQIFVLHVLGATEMVLLVAMAWDRYVAICKPLHYLTIMSPRMCLMLLSGAWVIGFLHSVTQLAFIIKLNFCGPNEIDSFYCDLPQFIKLACIDPKKMQFMVTANSGFISMGTFLLLIISYIVILFIVRKHSSSGDLSKALSTLSAHISVVVLFFGPCIFVYMWPFPTVPVDKFLAILDFMVTPILNPAIYTLRNKDMKVAMRRLITQLFNLRKSP

SEQ ID NO: 1456 - protein, 308 aa, Artificial Sequence
  Synthetic
MNEANYSEVSEFIFLGLSTYRPTQYFLFAFAIISYAATFLGNFSVVFIVIFDPHLHSPMYFLLANLSFVDFCFSTSTVPKLISDLYSGHSIISIQSCIFQMFVLHLLGGCEMVLLVAMAWDRYVAICKPLYYLTIMNPRMCLLLLISAWIIGLIHSVAQLAFVVHLPFCASNEIDSFYCDLPRFIKMACINTYRMEFLVTADSGFISLSTFFLLIISYIFILFIVRKQSLGSLSKAFSTLSAHICVVVLFFGPCIFVYIWPFPTVPVDKFLAILDFMIIPILNPAIYTLRNKDMKVAMRRLLSRKSIC

SEQ ID NO: 1457 - protein, 312 aa, Artificial Sequence
  Synthetic
MDGENHSVVSEFLFLGLTHSWEIQLLLLVFSSVLYVASITGNILIVFSVTTDPHLHSPMYFLLASLSFIDLGACSVTSPKMIYDLFRKRKVISFGGCIAQIFFIHVVGGVEMVLLIAMAFDRYVALCKPLHYLTIMSPRMCLSFLAVAWTLGVSHSLFQLAFLVNLAFCGPNVLDSFYCDLPRLLRLACTDTYRLQFMVTVNSGFICVGTFFILLISYVFILFTVWKHSSGGSSKALSTLSAHSTVVLLFFGPPMFVYTRPHPNSQMDKFLAIFDAVLTPFLNPVVYTFRNKEMKAAIKRVCKQLVIYKRIS

SEQ ID NO: 1458 - protein, 310 aa, Artificial Sequence
  Synthetic
MDGENHSVVSEFLFLGLTHSWEIQLLLLVFSSVLYVASITGNILIVFSVTTDPHLHSPMYFLLASLSFIDLGACSVTSPKMIYDLFRKRKVISFGGCIAQIFFIHVVGGVEMVLLIAMAFDRYVALCKPLHYLTIMSPRMCLSFLAVAWTLGVSHSLFQLAFLVNLAFCGPNVLDSFYCDLPRLLRLACTDTYRLQFMVTVNSGFICVGTFFILLISYVFILFTVWKHSSGGSSKALSTLSAHSTVVLLFFGPPMFVYTRPHPNSQMDKFLAIFDAVLTPFLNPVVYTFRNKEMKAAIKRVCKQIYKRIS

SEQ ID NO: 1459 - protein, 310 aa, Artificial Sequence; identical to SEQ ID NO: 1458
  Synthetic

SEQ ID NO: 1460 - protein, 310 aa, Artificial Sequence; identical to SEQ ID NO: 1458
  Synthetic

SEQ ID NO: 1461 - protein, 312 aa, Artificial Sequence
  Synthetic
MDGENHSVVSEFLFLGLTHSWEIQLLLLVFSSVLYVASITGNIFIVFSVTTDPHLHSPMYFLLASLSFIDLGACSVTSPKMIYDLFRKRKVISFGGCIAQIFFIHVIGGVEMVLLIAMAFDRYVALCKPLHYLTIMSPRMCLSFLAVAWTLGVSHSLFQLAFLVNLAFCGPNVLDSFYCDLPRLLRLACTDTYRLQFMVTVNSGFICVGTFFILLISYVFILFTVWKHSSGGSSKALSTLSAHSTVVLLFFGPPMFVYTRPHPNSQMDKFLAIFDAVLTPFLNPVVYTFRNKEMKAAIKRVCKQLVIYKKIS

SEQ ID NO: 1462 - protein, 312 aa, Artificial Sequence
  Synthetic
MDGENHTVVSEFVFLGLTHSWEIQLLLLVLSSVLYILSMAGNILIVFSVTIDPHLHSPMYFLLACLSFIDLVACSVTSPKMVYDLFRKHKVISFGGCITQIFFIHLVGGVEMVLLVAMAFDRYIAICKPLHYLTIMSPRVCVLFLGAAWGLGISHSLFQLAFLIDLPFCGPNILDSFYCDLPKLLRLACKDTYKLQFMVTINSGFICVGSFLLLLISYIFILFSVWKHSSGGSSKALSTLSAHITVVFLFFGPTLFIYTWPHPNSQIDKFLALFDAVLTPFLNPVIYTFRNKEMKVVIRRVFKTLLTFRGIS

SEQ ID NO: 1463 - protein, 314 aa, Artificial Sequence
  Synthetic
MLMGGANLSVVSEFVFLGLTNSWDIQLLLFVFSSVFYVASMMGNSLIIFTVASDPHLHTPMYFLLANLSFIDLGVSSVTSPKMIYDLFRKHKVISFTGCVIQIFSIHVIGGVEMVLLIAMAFDRYVAICKPLHYLTILSPRMCLFFVVIAWIVGLIHSLAQLVFVINLPFCGPNVLDSFYCDLPRFIKLACVDTHKLEFMVTANSGFISVGSFFILIVSYIVIIISVQKHSSGGFSKALSTLSAHISVVVLFFGPLIFVYTWPTPSVHLDKFLAIFDAVITPFLNPVIYTFRNQEMKMAMKRVFKQLLSYRKIS

SEQ ID NO: 1464 - protein, 314 aa, Artificial Sequence; identical to SEQ ID NO: 1463
  Synthetic

SEQ ID NO: 1465 - protein, 314 aa, Artificial Sequence
  Synthetic
MLMGGANLSVVSEFVFLGLTNSWDIQLLLFVFSSVFYVASMMGNSLIIFTVASDPHLHTPMYFLLANLSFIDLGVSSVTSPKMIYDLFRKHKVISFTGCVIQIFSIHVIGGVEMVLLIAMAFDRYVAICKPLHYLTILSPRMCLFFVVIAWIVGLIHSLAQLVFVINLPFCGPNVLDSFYCDLPRFIKLACVDTHKLEFMVTANSGFISVGSFFILIVSYIVIIISVQKHSSGGFSKALSTLSAHISVVVLFFGPLIFVYTWTSPSVHLDKFLAIFDTVITPFLNPVIYTFRNQEMKMAMKRVFKHLMSYGKIS

SEQ ID NO: 1466 - protein, 291 aa, Artificial Sequence
  Synthetic
MVGANHSVVSEFVFLGLTNSWEIRLLLLVFSSMFYMASMMGNSLILLTVTSDPHLHSPMYFLLANLSFIDLGVSSVTSPKMIYDLFRKHEVISFGGCIAQIFFIHVIGGVEMVLLIAMAFDRYVAICKPLQYLTIMSPRMCMFFLVAAWVTGLIHSVVQLVFVVNLPFCGPNVSDSFYCDLPRFIKLACTDSYRLEFMVTANSGFISLGSFFILIISYVVIILTVLKHSSAGLSKALSTLSAHVSVVVLFFGPLIFVYTWPSPSTHLDKFLAIFDAVLTPVLNPIIYTFRN

SEQ ID NO: 1467 - protein, 291 aa, Artificial Sequence; identical to SEQ ID NO: 1466
  Synthetic

SEQ ID NO: 1468 - protein, 312 aa, Artificial Sequence
  Synthetic
NQSVVSEFVFLGLTNSWNIQLFLFVFSSIFYVASMMGNSLIVFTVVSDSHLHSPMYFLLANLSFIDLGISSVTSPKMICDLFRKHKVISFRGCVTQIFFIHVIGGVEMVLLIAMAFDRYVAICKPLHYLTIMSPRVCILFSVASWVVGFMHSLVQLAFVVNLPFCGPNVLDSFYCDFPRFIKLACTDTYKLELLVSINSGFMSVGSFFILIISYIVIIFTVQKHSSSGSSKALSTLSAHVTVVVLFFGPVMFFYTWPSSYTHLDKFLAIFDAIVTPFLNPVIYTLRNQEMKIAMMRVFSKLMGCRQIFKHLN

SEQ ID NO: 1469 - protein, 316 aa, Artificial Sequence
  Synthetic
MEGMNQSMVSEFVFLGLTNSWDIQLFLFVFSSMFYVASMTGNSLIVFTVASDPHLHSPMYFLLANLSFIDLGVSSVIAPKMIYDLFRKHKVISFRGCVTQIFFIHFIGGVEMVLLIAMAFDRYVAICKPLHYLIIMSPRMCILFIVASWVVGFMHSLVQLAFVVNLPFCGPNVLDSFYCDFPRFIKLACIDTYRLKLLVLVNSGFMSVGSFFILIISYVVIIFIVHKHSSSGSSKALSTLSAHVMVVVLFFGPVMFIYTWPSSFTHLDKFLPIFDAIVTPFLNPVIYTFRNQEMKMAMMRVLRQIMGYRQIIKHLH

SEQ ID NO: 1470 - protein, 312 aa, Artificial Sequence
  Synthetic
MEGTNRSVVSEFMFVGLTNSWKMQVLLFVFASVFYMASMMGNSLIIFTVASDPHLHSLMYFLLANLSFIDLGVSCVTCPKMIYDLFRKHKVISFRGCITQIFFIHVIGGVEVVLLIGMAYDRYVAICKPLHYLTIMNAKMCIFILVSAWVVGLMHSLVQFVYIVNLPFCGPNILDSFYCDLPRFIRLACVDTNQLELMVSANSGFISVGSFFILVISYIVIIVTVQKHSSSGSSKALSTLSAHISVVVLFFGPLIFVYTWPSPSTHLDKYLAIFDAVGTPFLNPVIYTLRNQDMKTAMKRVCRQLLKYGKIS

SEQ ID NO: 1471 - protein, 311 aa, Artificial Sequence
  Synthetic
MKRVNHSVTSEFVFLGLTNSWNIQLLLFLLSSVLYVASMMGNCLIIFTVASDPQLHSPMYFLLSNLSFIDIGISSATSPKMIYDLFKKNKVISFRGCIIQIFFIHAIGGVEMVLLIAMAFDRYVAICKPLHYLTMMSPQMCIFFLITAWVVGLMHSVIQLVFIVNLPLCGQLLDSFYCDLPQFIKLACMDTYRLELMVSISSGFMSVAFFFILIISYVVIIFTVLKHSSSGSYKALSTLSAHVTVVVLFFGPAIFFYTWPSSSTHLDKFLALFDAVVTPFLNPVIYTLRNQEMKMAMRRVFRHLMGYRQIS

SEQ ID NO: 1472 - protein, 312 aa, Artificial Sequence
  Synthetic
MDEANHSVVSEFVFLGLSDSRKIQLLLFLFFSVFYVSSLMGNLLIVLTVTSDPRLQSPMYFLLANLSIINLVFCSSTAPKMIYDLFRKHKTISFGGCVVQIFFIHAVGGTEMVLLIAMAFDRYVAICKPLHYLTIMNPQRCILFLVISWIIGIIHSVIQLAFVVDLLFCGPNELDSFFCDLPRFIKLACIETYTLGFMVTANSGFISLASFLILIISYIFILVTVQKKSSGGIFKAFSMLSAHVIVVVLVFGPLIFFYIFPFPTSHLDKFLAIFDAVITPVLNPVIYTFRNKEMMVAMRRRCSQFVNYSKIF

SEQ ID NO: 1473 - protein, 312 aa, Artificial Sequence; identical to SEQ ID NO: 1472
  Synthetic

SEQ ID NO: 1474 - protein, 312 aa, Artificial Sequence
  Synthetic
MGEANCSVVSEFVFLGLSNSWAIQLFLFFFSCIFYVASLLGNFLIVLTVTSDPQLQSPMYFLLGNLSIIDLIFCSSTTPKMIYDLFRRHKTISFGGCITQIFFIHAVGGTEMVLLIAMAFDRYVAICKPLHYLTIMSPQKCILILVASWIIGFIHSVTQLSFVVDLPFCGPNELDSFFCDLPRFIKLACVDTYTLGFMVTANSGFISVASFLILIISYIFILVTVQKKSLGSLGKALSTLSAHVIVVVLFFGPLIFFYTWPFPTSHLDKFLAIFDAVITPFLNPVIYTLRNKEMKVAMRRLCSQFVNYNKIS

SEQ ID NO: 1475 - protein, 312 aa, Artificial Sequence
  Synthetic
MDKANHSVVSEFVFLGLSNRWGIQLLLFLFSSMFYIASVMGNLLIVFSVTADSNLHSPMYFLLANLSFLDLGVCSIAAPKMIFDLFRKHKAISFGGCITQIFFIHAIGGTEMVLLIAMAFDRYVAICKPLHYLTIMRPQICILILAVSWVLGLIHSVAQLAFVVDLPFCGPNILDSFYCDLPQLIKLACTETSKLVFMVTANSGLISVGSFFILIISYIFILVTVRKHSSGSIAKALSTLSAHVTVVVLFFGPLIFFYTWPFPSSHLDKFLAIFDAVLTPFLNPVIYTFRNKEMKAAMRKLCSQLVNYRKVS

SEQ ID NO: 1476 - protein, 312 aa, Artificial Sequence
  Synthetic
MNGMNHSVVSEFVFMGLTNSREIQLLLFVFSLLFYFASMMGNLVIVFTVTMDAHLHSPMYFLLANLSIIDMAFCSITAPKMICDIFKKHKAISFRGCITQIFFSHALGGTEMVLLIAMAFDRYMAICKPLHYLTIMSPRMCLYFLATSSIIGLIHSLVQLVFVVDLPFCGPNIFDSFYCDLPRLLRLACTNTQELEFMVTVNSGLISVGSFVLLVISYIFILFTVWKHSSGGLAKALSTLSAHVTVVILFFGPLMFFYTWPSPTSHLDKYLAIFDAFITPFLNPVIYTFRNKDMKVAMRRLCSRLAHFTKIL

SEQ ID NO: 1477 - protein, 312 aa, Artificial Sequence; identical to SEQ ID NO: 1476
  Synthetic

SEQ ID NO: 1478 - protein, 316 aa, Artificial Sequence
  Synthetic
MSEAMYGMNCSVVSEFVFLGITNIWEVQFLLFFFTLLFYFASMIGNLVIVLTVTLDPHLNSPLYFLLANLSVIDMIFCSITAPKMICDIFKKHKTISFWGCITQIFFSHAVGGTEMVLLIAMAFDRYVAICKPLHYLIIMSPRVCLFFLITSWVIGLIHSVVQLVFVVDLPFCGPNTLDSFYCDLPRLLRLACTNTQELELMVTVNSGLISVGSFLLLVISYIFILFTVWKHSSCGLSKALSTLSAHITVVILFFGPLMFFYTWPSPTSHLDKYLAIFDAFITPFLNPVIYTFRNKDMKVAMGRLWGYLRHYRKMS

SEQ ID NO: 1479 - protein, 312 aa, Artificial Sequence
  Synthetic
MIRANYSAVSEFVLLGLSNSWEIQVFIFFFTCLFYVSSLTGNFIIVVTVTSDPYLHSPMYFLLANLSVIDLIFCSIAAPKMICDLFRKQKVISFGGCISQIFFSHAVGGTEMVLLIAMAFDRYVAICKPLRYLTIMSPRMCLLILVAAWIIGLIHSSAQLAFVINLPFCGPNILDSFYCDIPRLVKLACTDTYKLELMITANSGFISLIAFFLLIISYVFLLTTVQKQSSGCSSKALSTLLAHITVVVLFFGPLIFFYVCPSPSTHVDKFLAIFDAVLTPFLNPIIYTLRNRDMKIAIRKVFCQCLAFRKSM

SEQ ID NO: 1480 - protein, 316 aa, Artificial Sequence
  Synthetic
MDGGNHSVVSEFLLLGLTNSWRIQILLFLFFTVFYVASMLGNLLIVLTIISDHHLHSPMYFLLANLSFIDTGVSSIATPKMIYDLFRKHKVISLNGCITQMFFIHTVGGTEMVLLIVMAYDRYIAICKPLHYLTIMSLRMCIVLLALAWIIGLIHSVAQLAFVVNLPFCGANKMDSFYCDFPRFIKLACTDTYRLEFLVTANSGFISMATFFILIVSYIFILVTVRKHSSGASSKALSTLSAHITVVVFFFGPCIIVYVWPFPTLPIDKFLAIFDAIITPSMNPVIYTLRNKEMKVAMRRLFARALSFIDSLRDSN

SEQ ID NO: 1481 - protein, 316 aa, Artificial Sequence
  Synthetic
MDGGNHSMVSEFLLLGLTNSWRIQILLFLFFTVFYVASMLGNLLIVLTIISDHHLHSPMYFLLANLSFIDTGVSSIATPKMIYDLFRKHKVISLNGCITQMFFIHTVGGTEMVLLIVMAYDRYIAICKPLHYLTIMSLRMCIVLLALAWIIGLIHSVAQLAFVVNLPFCGANKMDSFYCDFPRFIKLACTDTYRLEFLVAANSGFISMATFFILIVSYIFILVTVRKHSSGASSKALSTLSAHITVVVFFFGPCIIVYVWPFPTLPIDKFLAIFDVIITPFMNPLIYTLRNNEMKVAMRRLFIRHFKNFFISSLRD

SEQ ID NO: 1482 - protein, 312 aa, Artificial Sequence
  Synthetic
MDQVNASALPEFVLLGLAQSFGTQIFFGLFFSLFYVGILFGNLFIVFIVIVDSHLHFPMYILLANLSLIDLGLSSTTIPRTISDLFTGCKVISFHSCMTQMFFIHVMGGVEMVLLIAMAYDRYIAICKPLHYLMIMNPKKCIILVIAAWVIGMIHAVSQFLFVVNLPFCGPYNVGSFYCDFPRVIKLACMDTYKLEFVVSANSGFISMCTFFFLITSYIFILASVRQHSSTDLSKAFVTLSAHITVVVLFFIPCMFLYVWPFPTKSLDNFFAIVDFVLTPVLNPTIYTLRNKDMRLAIRRLSRQVLSSREFI

SEQ ID NO: 1483 - protein, 313 aa, Artificial Sequence
  Synthetic
MPMDQLNDSRVSEFVLLGLSSSWETKVFLMVTFSMLYIGIILGNLFIVILVIADSHLHSPMYFLLANLSLNDVWVSSTTVPKMISDLLKEHKVISFHNCMTQICFIHIMGGVEMVLLIAMAFDRYTAICKPLRYLSIMSPRICISFVIAGWVTGVVHAMSQFSFVVSLPFCGPNKVDSFYCDFPRIIQLACTDGDKFEFVVAANSGFMSMGTFFLLLLSYVFILVTVWQRSSGDLSKALVTLSAHITVVVLFFTPCMFLYVWPFPTSSIDKYLFIADFAITPALNPVIYTFRNKDIRIAIGRLSKRAVCSRFC

SEQ ID NO: 1484 - protein, 311 aa, Artificial Sequence
  Synthetic
MDQINETVAFEFVLLGLSSSWKNTIFLMSTFSLLYVSIIVGNLFIVFLVINDSRLQSPMYFLLANLSLIDVGLSSTTVPKMISDLLKEHKVISFHSCMTQICSIHIMGGVEMVLLIAMAFDRYTAICKPLHYMSIMSPRICISFVIAGWVTGVVHAMSQFSFVVNLPFCGPNKVDSFYCDFPRIIQLACTDRDTFEFVVAANSGFMTLGTFFLLLLSYVFILVTVWQRSSGDLSKALVTLSAHITVVVLFFTPCMFLYVWPFPTSSTDKYLFIVDFAVTPALNPVIYTLRNKDMKEAIKKLSKQRCYIRIF

SEQ ID NO: 1485 - protein, 319 aa, Artificial Sequence
  Synthetic
SAAGLSPENSSTITELVLVGFSDQPQTEIPLFIFFSLVYLASCLGNTAVVILVALDVSLQTPMYFFLCHLAFLNGFFSTVVTPKMLFNFLASRKVISYPFCLAQTYLTLFLESTECFLLAVMAIDRYVAICYPLRYLLIMSWAVCIALAVAVWVTGFCASVLPLCFMILPLCSPYVVDYLFCELPILLHLFCADTSLQEAMMAVGGAGTVLVPFLLIALSYLRILVTVIRIDSAEGRKKAFSTCASHLAVVTIYYGTGLIRYLRPKSLYSAEGDKLISVFYAVIGPALNPFIYSLRNKEVQGAVRRVVERYRKSPRIAF

SEQ ID NO: 1486 - protein, 312 aa, Artificial Sequence
  Synthetic
MADRNLTVITEFILLGLTEDPVLNTVLSVLCLLIYVITVAGNLWIIVIILATDQLHSPKYFFLTHLAFLDFCYSSVFLPKMLINYLVGQNSISYHGCLLQYSFVNMFLTAECFLLAAMAYDRYLAICSPLYYRCLMTPTFCIYLVSASYLLGCANSLTHLRSLLNLTFCGPNVIDHYFCDIPLLFQLSCSDTHDSEVLFIVLSGATSITTFLIVVSSYLGILITVLKIHSARGSYKALSTCASHLTVVTLFYGTVISTYLGTSSSFPQDTEKILSVFYTLLLPVLNLFIYSVRNKEAKEAMRRMIKRKIFAQ

SEQ ID NO: 1487 - protein, 319 aa, Artificial Sequence
  Synthetic
MGPGTLNDSGTTEFLLLGLWAPPSLRPLLWASLLLAYLTTVLGNGALVGLIALDRRLHRPMYRLLTHLALLDTAYVSTTLPQALAHMTMRSARLSLVRCGTQLYVGISLGSCEAILLAAMALDRCLAVCRPLHYATLVTAPRCAALAGASWTLGFALSVPNAVAALRLPFCPGAAVDHFFCELPAVLRTACADTTANYRLVYGLGVPILLVPLVLILASYTWILAAVRKLPSAGSRHKALSTCSSHLAVVGLFYGTVSAMYLRPKASDLPARHHKLVAVFYLVVTPVLNPLIYSLRNREVHMAARYALARLRGTRIVLH

SEQ ID NO: 1488 - protein, 319 aa, Artificial Sequence; identical to SEQ ID NO: 1487
  Synthetic

SEQ ID NO: 1489 - protein, 315 aa, Artificial Sequence
  Synthetic
MEVCNSTLGSGFILVGILDDSGFPELLCATITALYFLAITSNGLLLLVITMDARLHVTMYLLLWQLSLMDLLLTSVITPKAILDYLLKDNTISFGGCALQMFLELTLGSAEDLLLAFMAYDRYVAICHPLNYTILMSQKVCCLMIATSWILASLSALGYSIYTMQYPFCKSRQIRHLFCEIPPLLKLACADTSTYELMVYVMGVTLLIPPLAAILASYSLILFTVLHMPSNEGRKKALVTCSSHLTVVGMWYGGAIVMYVLPSSFHSPKQDNISSVFYTIFTPALNPLIYSLRNKEVTGALRRVLGKRFSVQSTF

SEQ ID NO: 1490 - protein, 311 aa, Artificial Sequence
  Synthetic
MELWNSTVGSGFILVGILDGSGSPELLCAAITALYFLALTSNGLLLLVITMDARLHVPMYLLLGQLSLMDLLLTSVITPKAVVDFLLKDNTISFGGCALQMFLELALGSAEDLLLAFMAYDRYVAICQPLNYTILMSHKVCWLMIATSWILASLSALGYSIYTMQYSFCKNRQINHLFCEIPPLLKLACADTSTYELMVYLMGVIVLILPLTAILASYSLILFTVLNMPSNEGRKKALVTCSSHLTVVGMWYGGASFMYVLPSPFHSPKQDNISSVFYTIVTPALNPLIYSLRNKEVTGALKRVLGKRLSA

SEQ ID NO: 1491 - protein, 315 aa, Artificial Sequence
  Synthetic
MEVFNSTLGSGFILVGILNDSGFPEMLCAIIIALYFLALTSNGLLLLVITMDARLHMPMYLLLWQLSLMDLLQPSVIIPKAVLDFLLKDNTISFGGCAFQMFLALTLGSAEDLLLSFMAYDRYVAICHPLNYTILMSQKVCYLMIATSWILASLSALGYSMYTMQYPFCKSRQIRHLFCEIPPLLKLACGDTSTYELMVYLMGVTLLFPALAAILTSYSLILLTVLHMPSNEGRKKALVTCSSHLTVVGMWYGGAIFMYILPSSFHSPKQDNISSVFYMIVTPALNPLIYSLRNNEVIEALKRVLGKKFSVHSTF

SEQ ID NO: 1492 - protein, 316 aa, Artificial Sequence
  Synthetic
MEPWNSTLGTDFNLVGILDDSGSPELLCATFTALYMLALISNGLLILVITMDARLHVPMYFLLGQLSLMDLLFTSVVTPKAVIDFLLRDNTISFEGCSLQMFLALTLGGAEDLLLAFMAYDRYVAICHPLNYMIFMRPSICWLMVATSWVLASLMALGYTTYTMQYSYCKSRKIRHLLCEIPPLLKLACADTSKYELMVYVMGVTFLIPPLAAILASYSLILFTVLHMPSNEGRKKALVTCSSHLTVVGMFYGAATFMYVLPNSFHSPRQDNIISVFYTIVTPALNPLIYSLRNKEVTGALIRVLGRYIVPAHPTL

SEQ ID NO: 1493 - protein, 316 aa, Artificial Sequence
  Synthetic
MELWNSTLGSGFILVGILDDSGSPEILCATFTALYMLAMISNGILLLVITMDARLHVPMYLLLWQLSLMDLLLTSVITPKAVIDFLLKDNTISFGGCALQMFLELTLGGAEDLLLAFMAYGRYVAICHPLNYMTFMKPRICWLGVFISWTLASLSAVGYTIYTMQYPFCKSRKIRHLFCEIPPLLKLACADTSKYELMVYVMGVIFLLLPLAAILSSYTLILLTVLHMPSHEGRKKALVTCSSHLTVVGMWYGGASFMYVLPSSFHTPKQDNIFSVFYTIVTPALNPLIYSLRNKEVTGALRRVLGGRLLPEHSTF

SEQ ID NO: 1494 - protein, 316 aa, Artificial Sequence
  Synthetic
MEPWNSTLGSGFILVGILDGSGSPELLCATIAALYMLALISNGMLILVITMDIYLHVPMYLLLEQLSLMDLLLASVISPKAVMDFLLKDNTITFGGCALQMFLELALGSAEDLLLAFMAYDRYVAICHPLNYMIFMRPSICWLMVAISWIPASLSALGYTIYTMQYPFCKSREIRHLFCEIPPLLKLACADTSRYQLMVYLMGVTLLIPPLAAILASYSLILFTVLKMPSNEGRKKALVTCSSHLTVVGMYYGPLTVMYILPSSYHSSKQENILSFLYTIVTPALNPLIYSLRNKEVSGALKRVLGKRLLSTHPNF

SEQ ID NO: 1495 - protein, 319 aa, Artificial Sequence
  Synthetic
MEFRNSTMGNGFILVGILDDSGAPDLLCATITALYMLALTSNGVLLLVITMDARLRVPMYLLLGQLSLMDLLLTSVITPKAVIDFLLKDNTISFGGCALQMFLELVLGSAEDLLLAFMAYDRYVAICHPLNYMIFMRPSVCWFIVGTIWILASVIALGFTIYTMNYPFCKSRQIRHLFCEIPPLLKLACEDTSTYELMVYLAGVSVLILPLAVILASYVRILFTVLHMPSNEGRKKALVTCSSHLIVVGMWYGGSSLMYVLPSQFHSPKQDNILSIFYTIVTPALNPLIYSLRNKEVTGALRRIFGKWLGPAHFLGSSF

SEQ ID NO: 1496 - protein, 316 aa, Artificial Sequence
  Synthetic
MESWNSTLGGTFILVGILDDSGSPDLLCAVITALYMLAMISNGLLLLVITMDAQLHVPMYLLLGQLSLIDFFLTSIIIPKAVMDFLLKDNTISLEGCALQMFLALTLGGAEDLLLAFMAYDRYVAICHPLNYMIFMRPSICWLGVATSWILGLLSALGYTIHTMQYPFCKSRKIRDLYCEIPPLLKLACADTSKYELMVYVMGVAFLIPPLAAILASYILILFTVLNKPSNEGRKKALVTCFSHLTVVGLYYGALTVMYVLPSSYLSPKQENLLSVFYTVVTPALNPLIYSLRNKEVTGALRRVLGKWFLPTQSTF

SEQ ID NO: 1497 - protein, 316 aa, Artificial Sequence
  Synthetic
MELWNFTLGSGFILVGILNDSGSPELLCATITILYLLALISNGLLLLAITMEARLHMPMYLLLGQLSLMDLLFTSVVTPKALADFLRRENTISFGGCALQMFLALTMGGAEDLLLAFMAYDRYVAICHPLTYMTLMSSRACWLMVATSWILASLSALIYTVYTMHYPFCRAQEIRHLLCEIPHLLKVACADTSRYELMVYVMGVTFLIPSLAAILASYTQILLTVLHMPSNEGRKKALVTCSSHLTVVGMFYGAATFMYVLPSSFHSTRQDNIISVFYTIVTPALNPLIYSLRNKEVMRALRRVLGKYMLPAHSTL

SEQ ID NO: 1498 - protein, 316 aa, Artificial Sequence; identical to SEQ ID NO: 1497
  Synthetic

SEQ ID NO: 1499 - protein, 316 aa, Artificial Sequence
  Synthetic
MELRNSTLGSGFILVGILNDSGSPELLYATFTILYMLALTSNGLLLLAITIEARLHMPMYLLLGQLSLMDLLFTSVVTPKALADFLRRENTISFGGCALQMFLALTMGSAEDLLLAFMAYDRYVAICHPLKYMTLMSPRVCWIMVATSWILASLIAIGHTMYTMHLPFCVSWEIRHLLCEIPPLLKLACADTSRYELIIYVTGVTFLLLPISAIVASYTLVLFTVLRMPSNEGRKKALVTCSSHLIVVGMFYGAATFMYVLPSSFHSPKQDNIISVFYTIVTPALNPLIYSLRNKEVMRALRRVLGKYILLAHSTL

SEQ ID NO: 1500 - protein, 316 aa, Artificial Sequence
  Synthetic
MEPWNSTLESGFILVGILDGSGSPELLCATVTTLYMLALISNGLLLLVITVDARLHVPMYLLLRQLSLIDLLFTSVVTPNTVVDFLLRDNTISFEGCALQLFSAMTLGGAEDLLLAFMAYDRYVAICHPLNYMIFMSPKACRLMVAISWILASLSALGHTVYTMHFPFCMSQEIRHLLCEVPPLLKLACADTSQYELMVYVTGVIFLLLPLSAIITSYSLILFTVLHMPSNEGRKKALVTCSSHLTVVGMFYGGATFMYVLPSSFHSPKQDNIISVFYTIVTPALNPLIYSLRNKEVIGAVRRVLGRHILPAHATV

SEQ ID NO: 1501 - protein, 316 aa, Artificial Sequence; identical to SEQ ID NO: 1500
  Synthetic

SEQ ID NO: 1502 - protein, 316 aa, Artificial Sequence
  Synthetic
MELWNSTLESGFILVGILNGSSSPELLCAIVTALYMLALISNGLLLLVITVDARLHVPMYLLLRQLSLIDLLFTSVVTPKAVMDFLLRDNTISFGGCALQMALALMLGSAEDLLLAFMAYDRYVAICHPLNYMVFMSPTVCWLIVSTSWILASLTAVGHTVYTMHFPFCMSQEIRHLLCEILPLLKLSCVDTSQYELMVYVTGVTFLLLPLSAIVTSYTLILSTVLHMPSNEGKKKALVTCLSHLMVVGMFYGAATFMYVLPSSLHSAKQDNIISVFYTIVTPALNPLIYSLRNKEVIGALRRVLGRYILPAHLTL

SEQ ID NO: 1503 - protein, 317 aa, Artificial Sequence
  Synthetic
MEFRNSTLGSGFILVGILNGSDSPELLCATITFLYTLALTSNGLLLLVITVDTRLHVPMYLLLGQLSLIDLLLTSVITPKAVMDFLLRDNTISFGGCALQMFIELVLGGAEDLLLAFMAYDRYVAICHPLNYMILMSPRVCWLMVTASWILSIQMALGFTINTMHYSFCKSRHIRHLFCEIPPLLDLACADTSSYKLVVYLVGVFMLILPLTAIFFSYARILFTVLHMPSNESRKKALVTCSSHMTVVGMYYGALTVMYFLPSSYHNPKQDNILSVFYTIVTPALNPLIHSLRNKEVTGALRKVLGNTCCHHPIHLR

SEQ ID NO: 1504 - protein, 318 aa, Artificial Sequence
  Synthetic
MDLKNKTTSSFILLGLFPSCRYPNLLISFILLIYTLASAGNSLLILLIWLDPRLHTPMYFLLSQLSVIDLAYISCTVPKAAINYFTGRRNISFFACATQMFSFLTLGLAECILLTLMAYDRYVAVCNPLRYTILMSPKVCLMMAASTWIGAVTAALVHTVYPMNFPICGSREINHYFCEMPAILRMSCVDTSVYEMVKFVSTIIFLLTPFTLILTSYTLIFLTVLRMNSPKGRNKALATCSSHLTVVSLYFGQAIFIYMTPTSSHTPDQDQVGAVLGTIVTPMLNPLIYSLRNKEVIGALQKCTGRCCSRDRVGSLRC

SEQ ID NO: 1505 - protein, 318 aa, Artificial Sequence
  Synthetic
MDLKNKTTSSFILLGLFPSCRYPNLLISFILLIYTLASAGNSLLILLIWLDPRLHTPMYFLLSQLSVIDLAYISCTVPKAAINYFTGRQNISFFACATQMFSFLTLGLAECILLTLMAYDRYVAVCNPLRYTILMSPKVCLMMAASTWIGAVAAALVHTVYPMNFPICGSREINHYFCEMPAILRMSCVDTSVYEMVKFVSTIIFLLTPFTLILTSYTLIFLTVLRMNSPKGRNKALATCSSHLTVVSLYFGQAIFIYMTPTSSHTPDQDQVGAVLGTIVTPMLNPLIYSLRNKEVIGALQKCTGRSRDRVGSLRCCT

SEQ ID NO: 1506 - protein, 312 aa, Artificial Sequence
  Synthetic
MGDVNQSVASDFILVGLFSHSGSRQLLFSLVAVMFVIGLLGNTVLLFLIRVDSRLHTPMYFLLSQLSLFDIGCPMVTIPKMASDFLRGEGATSYGGGAAQIFFLTLMGVAEGVLLVLMSYDRYVAVCQPLQYPVLMRRQVCLLMMGSSWVVGVLNASIQTSITLHFPYCASRIVDHFFCEVPALLKLSCADTCAYEMALSTSGVLILMLPLSLIATSYGHVLQAVLSMRSEEARHKAVTTCSSHITVVGLFYGAAVFMYMVPCAYHSPQQDNVVSLFYSLVTPTLNPLIYSLRNPEVWMALVKVLSRLRQMC

SEQ ID NO: 1507 - protein, 312 aa, Artificial Sequence; identical to SEQ ID NO: 1506
  Synthetic

SEQ ID NO: 1508 - protein, 307 aa, Artificial Sequence
  Synthetic
MGTSNVSSNSDFILMGLLSYTGPHLVLFFLMATVFIIGLLGNTTLLFLIATDSRLHTPMYFLLSQLSLLDVGFPLVTIPKVVAEFLQGQNVISFGGCATQMFFLMLMGVSEGVLLSLMSYDRYVAVCHPLHYQVLMRNQVCLVMVGASWFSGALVASIQTSITLQFPYCASHTVDHFFCELPALLKLSCADTSAYELALSISGVLILLLPLSLIFISYGHVLGAVLLMRSAEARHKAFTTCSSHVTVVGLFFGAAVFIYMVPGSYHSPKQDNVVSLFYSLITPTLNPLIYSLRNREVRMSLGQGYGQ

SEQ ID NO: 1509 - protein, 314 aa, Artificial Sequence
  Synthetic
MGTSNVSSNSDFILMGLFSYTGPHLVLFFLMATVFIIGLLGNTTLLFLIATDSRLHTPMYFLLSQLSLLDVGFPLVTIPKVVAEFLQGQNVISFGGCATQMFFLMLMGVSEGVLLSLMSYDRYVAVCHPLHYQVLMRNQVCLVMVGASWFSGALVASIQTSITLQFPYCASHTVDHFFCELPALLKLSCADTSAYELALSISGVLILLLPLSLIFISYGHVLGAVLHMRSAEARHKAFTTCSSHVTVVGLFYGAAVFMYMVPGSYHSPKQDNVVSLFYSLITPTLNPLIYSLRNREVRMSLVKVMGRSDFRVKR

SEQ ID NO: 1510 - protein, 314 aa, Artificial Sequence
  Synthetic
MGTSNVSSNSDFILMGLFSYTGPHLVLFFLMATVFIIGLLGNTTLLFLIATDSRLHTPMYFLLSQLSLLDVGFPLVTIPKVVAEFLQGQNVISFGGCATQMFFLMLMGVSEGVLLSLMSYDRYVAVCHPLHYQVLMRNQVCLVMVGASWFSGALVASILTSITLQFPYCASHTVDHFFCEMPALLKLSCADTSAYELALSISGVLILLLPLSLIFISYGHVLGAVLLMRSAEARHKAFTTCSSHVTVVGLFFGAAVFIYMVPGSYHSPKQDNVVSLFYSLITPTLNPLIYSLRNREVRMSLVKFMGRSDFKVKG

SEQ ID NO: 1511 - protein, 315 aa, Artificial Sequence
  Synthetic
MGSEHWNYSTAGFVLTSLFNNSQTHLFLFSMVMLVYILAMAGNTAMVLLIWMDTRLHTPMYFLLSQLSFLDIFFTSVTVPKMIVGFLFGWTSISFGGCGAQMFFFMFLGAAECLLLALMAYDRYVAICNPLRYPVLMSRRVCLLMVVASWLGGSLNASIQTSLTLQFPYCGSRKISHFFCEVPSLLMLACADTEAYKQVLFVTGVVVLLVPITFITASYALILAAVLRMHSVEGRQKALATCSSHLTVVNLFYGPLVYTYMLPASYHSPGQDDVVSVFYTVLTPMLNPVIYSLRNKEVTGAMKKAMRRCGVNRNA

SEQ ID NO: 1512 - protein, 315 aa, Artificial Sequence; identical to SEQ ID NO: 1511
  Synthetic

SEQ ID NO: 1513 - protein, 313 aa, Artificial Sequence
  Synthetic
MMQWNNWTRNSDFILLGFFDHSPLHTFFFSLILAIFFMALIGNSVMVILIYLDAQLHTPMYILLSQLSLMDLMLISTTVPQTAFNFLSGNKSISMAGCGVQIFFYVSLLGAECFLLAAMAYDRYVAICYPLRYPILMSHKICSLMAAFSWILGSLDGIIDVAAVLSFSYCGTREIPHFFCDIPALLTISCSDTLIFEKIIFFCCVIMLIFPVVIVIASYICVILAVIKMASAESRHKAFATCSSHVMVVVIYYGAAMFIYMQPSSSRSPNQDKLVSAFYTILTPLLNPLIYSLRNKEVARAFMKVLRMDKAAG

SEQ ID NO: 1514 - protein, 313 aa, Artificial Sequence; identical to SEQ ID NO: 1513
  Synthetic

SEQ ID NO: 1515 - protein, 315 aa, Artificial Sequence
  Synthetic
MLMIQWNNWTRNSDFILLGLFDHSPLHTFFFSLILGIFFMAFIGNSIMVILIYLDAHLHTPMYILLSQLSLMDLMLICTTVPQMAFNFLSGNKSISMVGCGIQIFFYVSLLGAECFLLAAMAYDRYVAICYPLRYPILMSDKICGLMAASSWVLGSLDGIIEVAAALSFSYCGAREIPHFFCDVPALLTLSCSNTLIFERIIFFCCVIMLTLPVAIIIASYTRVILTVLHMSSAESRHKAFATCSSHLMVVGMYYGAAMFIYMRPSSGRSPTQDKIVSAFYTILTPMLNPLIYSLRNKEVARAFMKVLGIDKAAA

SEQ ID NO: 1516 - protein, 312 aa, Artificial Sequence
  Synthetic
MAWENQTFNSDFLLLGIFNHSPTHTFLFFLVLAIFSVAFMGNSIMVLLIYLDTQLHTPMYFLLSQLSLMDLMLICTTVPKMAFNYLSGSKSISMAGCATQIFFYISLLGSECFLLAVMSYDRYTAICHPLRYTNLMRPKICGLMTAFSWILGSTDGIIDAVATFSFSYCGSREIAHFCCDFPSLLILSCNDTSIFEEVIFICCIVMLVFPVAIIITSYARVILAVIHMGSGEGRRKAFTTCSSHLMVVGMYYGAGLFMCIQPTSHHSPMQDKMVSVFYTIVTPMLNPLIYSLRNKEVTRALMKILGKGKSGD

SEQ ID NO: 1517 - protein, 311 aa, Artificial Sequence
  Synthetic
MAWENQTFNSGFILLGIFNHSPTRTFLFFLVLCIFVAFMGNSLMVLLIYLDTQLHTPMYFLLSQLSPMDVRLICTTVPKMAFNYLSGSKSISMAGCATQIFFYISLLGSECFLLAVMSYDRYTAICHPLRYTNLMRPKICGLMTAFSWILGSTDGIIDAVATFSFSYCGSREIAHFCCDFPSLLILSCNDTSIFEEVIFICCIVMLVFPVAIIITSYARVILAVIHMGSGEGRRKAFTTCSSHLMVVGMYYGAGLFMCIQPTSHHSPMQDKMVSVFYTIVTPMLNPLIYSLRNKEVTRALMKILGKGKSGD

SEQ ID NO: 1518 - protein, 312 aa, Artificial Sequence
  Synthetic
MARENSTFNSDFILLGIFNHSPTHTFLFFLVLAIFSVAFMGNSVMVLLIYLDTQLHTPMYLLLSQLSLMDLMLICTTVPKMAFNYLSGSKSISMAGCATQIFFYTSLLGSECFLLAVMAYDRYTAICHPLRYTNLMSPKICGLMTAFSWILGSTDGIIDVVATFSFSYCGSREIAHFFCDFPSLLILSCSDTSIFEKILFICCIVMIVFPVAIIIASYARVILAVIHMGSGEGRRKAFTTCSSHLLVVGMYYGAALFMYIRPTSDRSPTQDKMVSVFYTILTPMLNPLIYSLRNKEVTRAFMKILGKGKSGE

SEQ ID NO: 1519 - protein, 312 aa, Artificial Sequence; identical to SEQ ID NO: 1518
  Synthetic

SEQ ID NO: 1520 - protein, 312 aa, Artificial Sequence
  Synthetic
MAWENQTFNSDFILLGIFNHSPTHTFLFFLVLAIFSVAFMGNSVMVLLIYLDTQLHTPMYFLLSQLFLMDLMLICSTVPKMAFNYLSGSKSISMAGCATQIFFYVSLLGSECFLLAVMSYDRYIAICHPLRYTNLMRPKICGLMTAFSWILGSMDAIIDAVATFSFSYCGSREIAHFFCDFPSLLILSCNDTSIFEKVLFICCIVMIVFPVAIIIASYARVILAVIHMGSGEGRRKAFTTCSSHLMVVGMYYGAGLFMYIRPTSDRSPMQDKLVSVFYTILTPMLNPLIYSLRNKEVTRALRKVLGKGKCGE

SEQ ID NO: 1521 - protein, 319 aa, Artificial Sequence
  Synthetic
MAWENQTFNSDFILLGIFNHSPPHTFLFFLVLGIFLVAFMGNSVMVLLIYLDTQLHTPMYFLLSQLSLMDLMLICTTVPKMAFNYLSGSKSISMAGCVTQIFFYISLSGSECFLLAVMAYDRYIAICHPLRYTNLMNPKICGLMATFSWILGSTDGIIDAVATFSFSFCGSREIAHFFCEFPSLLILSCNDTSIFEEVIFICCIVMLVFPVAIIIASYARVILAVIHMGSGEGRCKAFTTCSSHLMVVGMYYGAALFMYIRPTSDHSPTQDKMVSVFYTILTPMLNPLIYSLRNKEVTRAFMKILGKSESELPHKLYVL

SEQ ID NO: 1522 - protein, 309 aa, Artificial Sequence
  Synthetic
MVWENQTFNSIFILLGIFNHSPTHTFLFSLVLGIFSLALMENISMVLLIYIEKQLHTPMYFLLSQLSLMDLMLICTTLPKMIFSYLSGKKSISLAGCGTQIFFYVSLLGAECFLLAVMAYDRYVAICHPLQYTILMNPKLCVFMTVASWTLGSLDGIIVLAAVLSFSYCSSLEIHHFFCDVAALLPLSCTETSAFERLLVICCVVMLIFPVSVIILSYSHVLRAVIHMGSGESRRKAFTTCSSHLSVVGLYYGAAMFMYMRPASKHTPDQDKMVSAFYTILTPMLNPLIYSLRNKEVFRALQKVRRKES

SEQ ID NO: 1523 - protein, 311 aa, Artificial Sequence
  Synthetic
MVWENQTFNSIFILLGIFNHSPTHTFLFSLVLGIFSLALMENISMVLLIYIEKQLHTPMYFLLSQLSLMDLMLICTTLPKMIFSYLSGKKSISLAGCGTQIFFYVSLLGAECFLLAVMAYDRYVAICHPLQYTILMNPKLCVFMTVASWTLGSLDGIIVLAAVLSFSYCSSLEIHHFFCDVAALLPLSCTETSAFERLLVICCVVMLIFPVSVIILSYSHVLRAVIHMGSGESRRKAFTTCSSHLSVVGLYYGAAMFMYMRPASKHTPDQDKMVSAFYTILTPMLNPLIYSLRNKEVFRALQKVLKKRKLI

SEQ ID NO: 1524 - protein, 312 aa, Artificial Sequence
  Synthetic
MAEELWNHSSLSSFILAGLFGHSPYDSFFFSLVLLAFGAAVVGNILLLMVIQVDRRLHTPMYFFLSQLSIMDLTMTCTVVPKMATNFLSGGKLISLGGCASQIFFVVTVGGAECFLLAVMAYDRYMAVCYPLRYPVLMNWKACSFLATASWMGGMADSVIDVGVVFSFPYCGSLEVDHFFCEVPALLRLSCADTSLFEDLIYACCVVMLLLPLGVIVASYARVLTTVMRMPSTEGKQKALTTCSSHLAVVGLYYGGAIFSYMQRASARTPLGDRATSIFYTIVTPMFNPLIYSLRNREVTSALKKMLERWGM

SEQ ID NO: 1525 - protein, 315 aa, Artificial Sequence [sequence omitted]

SEQ ID NO: 1526 - protein, 315 aa, Artificial Sequence
  Synthetic
METWVNQSYTDGFFLLGIFSHSTADLVLFSVVMAVFTVALCGNVLLIFLIYMDPHLHTPMYFFLSQLSLMDLMLVCTNVPKMAANFLSGRKSISFVGCGIQIGLFVCLVGSEGLLLGLMAYDRYVAISHPLHYPILMNQRVCLQITGSSWAFGIIDGLIQMVVVMNFPYCGLRKVNHFFCEMLSLLKLACVDTSLFEKVIFACCVFMLLFPFSIIVASYAHILGTVLQMHSAQAWKKALATCSSHLTAVTLFYGAAMFIYLRPRHYRAPSHDKVASIFYTVLTPMLNPLIYSLRNREVMGALRKGLDRCRIGSQH

SEQ ID NO: 1527 - protein, 315 aa, Artificial Sequence
  Synthetic
MGIWLNESSVDGFILLGIFSQSQTDLLLFSTVMLVFTVALCGNVLLILLIYTDPRLHTPMYFFLSQLSLMDLMLVCNIVPKMAVNFLSGRKSISFAGCGIQIGFFVSLVGSEGLLLGLMAYDRYVAISHPLHYPILMSQKVCLQIAGSSWAFGILDGIIQMVAAMSLPYCGSRYIDHFFCEVPALLKLACADTSLFDTLLFACCVFMLLLPFSIIVTSYARILGAVLRMHSAQSRKKALATCSSHLTAVSLFYGAAMFIYLRPRRYRAPSHDKVVSIFYTVLTPMLNPLIYSLRNREVMGALRKGLDRCRVGSQH

SEQ ID NO: 1528 - protein, 315 aa, Artificial Sequence; identical to SEQ ID NO: 1527
  Synthetic

SEQ ID NO: 1529 - protein, 315 aa, Artificial Sequence
  Synthetic
MGRWVNQSYTDGFFLLGIFSHSQTDLVLFSAVMVVFTVALCGNVLLIFLIYLDAGLHTPMYFFLSQLSLMDLMLVCNIVPKMAANFLSGRKSISFVGCGIQIGFFVSLVGSEGLLLGLMAYDRYVAVSHPLHYPILMNQRVCLQITGSSWAFGIIDGVIQMVAAMGLPYCGSRSVDHFFCEVQALLKLACADTSLFDTLLFACCVFMLLLPFSIIMASYACILGAVLRIRSAQAWKKALATCSSHLTAVTLFYGAAMFMYLRPRRYRAPSHDKVASIFYTVLTPMLNPLIYSLRNGEVMGALRKGLDRCRIGSQH

SEQ ID NO: 1530 - protein, 315 aa, Artificial Sequence
  Synthetic
MAMWLNQSSTDDFILLGIFSYSPRDLLLFSVVMLVFTAALFGNALLILLICTDPRLHTPMYFFLSQLSLMDIMLVCTNVPKMAVNFLSGKKSISFVGCGIQIGLFVCLVGSEGLLLGLMAYDRYVAISHPLRYPVLMNQKVCLQIIGSSWAFGIADGLVQMVVVMTFPYCSLREVDHFFCEMLSLLKLACVDTSLFEKIVFFCCIFMLLFPFSIIVASYTRILGTVLHMHSAKSQKKALATCSSHMAAVSFFYGAAMFIYLRPRQYRTPSQDKMVSIFYTVLTPMLNPLIYSLRNRDVIGALQKGLDRCRVGSQP

SEQ ID NO: 1531 - protein, 317 aa, Artificial Sequence
  Synthetic
MAWAGNQTLISHFVLLGLFTHSPLHLFLFSIIMVMFLVALSGNGLMILLILMDSRLHTPMYFFLSWLSLMDLMLISTIVPRMAADFLLGRGSISFAGCGLQILFFLTLLGDECFLLAFMAYDRYVAISNPLRYSVIMSRRVCWLMVAGSWLFGLVDGLIQAVFTLRFPYCGSQEIDHFFCEVPAVLKLACADTSLYETMIYVCCVLMLLLPFSVISASYLRILVAVLRMRSAEGRRKAFATCSSHMIVVSLFYGAAMITYMRPQAYHSSKQDKVVSAFYTMITPMLNPLIYSLRNKEVTGALRKLLGKCPCGGGTLG

SEQ ID NO: 1532 - protein, 317 aa, Artificial Sequence; identical to SEQ ID NO: 1531
  Synthetic

SEQ ID NO: 1533 - protein, 309 aa, Artificial Sequence
  Synthetic
MKTPSNSTEADFILLGLFSHTHAHSLLLSVVLVIFTASLMGNTLMILLICRDPRLHTPMYFLLSQLSLMDMMLVSTIVPKMAANYLTSTRSISPAGCGSQIFLFLTLAGGECFLLAAMSYDRYVAICFPLRYHVLMNPKLCAYLTVGSWLLGAADGLMQAGTILSFPFCHSRTINHFFCEAPSLVRLACADTKVFEFFMYICCILMLLIPLSLVLASYSLILATVLRMRSSAARKKAFTTCSSHLAVVGLFYGAIIFIYMRPKSHQPGKSDKVVSAFYTIFTPVLNPLIYSVRNKEVKGALRKWLQKTV

SEQ ID NO: 1534 - protein, 309 aa, Artificial Sequence; identical to SEQ ID NO: 1533
  Synthetic

SEQ ID NO: 1535 - protein, 317 aa, Artificial Sequence
  Synthetic
MDRGNTTAGFVLLGLFNHTRAHLFLFVLVLTVAFNSVVGNALLLLLIHQDRRLHTPMYFLLSQLSLMDMMLVSTVVPQMAAGYLMGKKFISAAGCGFQIFFFLTLGGGECFLLAAMSYDRYVAICHPLRYPVLMSWQLCLRLTVASWLLGAADGAMQAAATLSFQFCSRNEIDHFFCEAPVLLRLACGDTSAFEFFMYICCVLMLLIPFSLILMSYGLILAAVLRMRSTEARKKAFATCSSHLAVVGLFYGAATFSYMRPTSSRSANHDKVVSAFYTIVTPMLNPLIYSLRNSEVKGSLRKCVTRALTSKDALAGLD

SEQ ID NO: 1536 - protein, 317 aa, Artificial Sequence
  Synthetic
MEMRNTTPDFILLGLFNHTRAHQVLFMMLLATVLTSLFSNALMILLIHWDHRLHRPMYFLLSQLSLMDVMLVSTTVPKMAADYLTGNKAISRAGCGVQIFFLPTLGGGECFLLAAMAYDRYAAVCHPLRYPTLMGWQLCLRMTMSSWLLGAADGLLQAVATLSFPYCGAHEIDHFFCEAPVLVRLACADTSVFENAMYICCVLMLLVPFSLILSSYGLILAAVLLMRSTEARKKAFATCSSHVAVVGLFYGAGIFTYMRPKSHRSTNHDKVVSAFYTMFTPLLNPLIYSVRNSEVKEALKLWLGTCVNLKHQQNEAH

SEQ ID NO: 1537 - protein, 317 aa, Artificial Sequence
  Synthetic
MEMRNTTPDFILLGLFNHTRAHQVLFMMLLATVLTSLFSNALMILLIHWDHRLHRPMYFLLSQLSLMDMMLVSTTVPKMAADYLTGNKAISRAGCGVQIFFLPTLGGGECFLLAAMAYDRYAAVCHPLRYPTLMSWQLCLRMTMSSWLLGAADGLLQAVATLSFPYCGAHEIDHFFCEAPVLVRLACADTSVFENAMYICCVLMLLVPFSLILSSYGLILAAVLLMRSTEARKKAFATCSSHVAVVGLFYGAGIFTYMRPKSHRSTNHDKVVSAFYTMFTPLLNPLIYSVRNSEVKEALKRWLGTCVNLKHQQNEAH

SEQ ID NO: 1538 - protein, 317 aa, Artificial Sequence
  Synthetic
MEMRNTTPDFILLGLFNHTRAHQVLFMMVLSIVLTSLFGNSLMILLIHWDHRLHTPMYFLLSQLSLMDMMLVSTTVPKMAADYLTGSKAISRAGCGVQIFFLPTLGGGECFLLAAMAYDRYAAVCHPLRYPTLMSWQLCLRMTMSCWLLGAADGLLQAVVTLSFPYCGAHEIDHFFCETPVLVRLACADTSVFENAMYICCVLMLLVPFSLILSSYGLILAAVLHMRSTEARKKAFATCSSHVAVVGLFYGAAIFTYMRPKSHRSTNHDKVVSAFYTMFTPLLNPLIYSVKNSEVKGALKRWLGTCVNIKHQQNEAH

SEQ ID NO: 1539 - protein, 312 aa, Artificial Sequence
  Synthetic
MENGSYTSYFILLGLFNHTRAHQVLFMMVLSIVLTSLFGNSLMILLIHWDHRLHTPMYFLLSQLSLMDVMLVSTTVPKMAADYLTGSKAISRAGCGAQIFFLPTLGGGECFLLAAMAYDRYAAVCHPLRYPTLMSWQLCLRMNLSCWLLGAADGLLQAVATLSFPYCGAHEIDHFFCETPVLVRLACADTSVFENAMYICCVLMLLVPFSLILSSYGLILAAVLHMRSTEARKKAFATCSSHVAVVGLFYGAAIFTYMRPKSHRSTNHDKVVSAFYTMFTPLLNPLIYSVKNSEVKGALTRCMGRCVALSRE

SEQ ID NO: 1540 - protein, 310 aa, Artificial Sequence
  Synthetic
MSNYTGQFSDFTLVGFFSQSKHPALLAVVIFVVFLMALSGNALLILLILSDTHLHTPMYFFISQLSLMDMMYISVTVPKMLMDQVLGSHKISAAACGMQMFLYLSIGGSEFLLLAAMSYDRYVAICHPLRYPVLMNHRICLLLLSVCWLLGSLDGFMLTPVTMTFPICGSREIHHFFCEVPAVTKLSCSDTWLYETLMYVCCVLMILIPVTVISGSYSSILLTVLKMNSAEGRKKALATCSSHMTVVTLFYGAAVYTYMLPASLHTPEKDMVVSVFYTIVTPLLNPLIYSFRNKNVTEAMKKLLGVSIPH

SEQ ID NO: 1541 - protein, 315 aa, Artificial Sequence
  Synthetic
MDLTTWMNNYTTQSDFTLVGFFSQSKHSALLAVVIFVVFLMALSGNALLILLVLSDTHLHTPMYFFISQLSLMDMMYISVTVPKMLMDQVLGSHKISAAACGMQMFLYVTLAGSEFFLLAAMSYDRYVAICHPLRYPVLMNYRVCLLLMSVCWILGSLDGFMFTPVTMTFPFCGSREIHHFFCEVPAVTKLSCSDTWLYETLMYVCCVLMLLIPVTVISGSYTSILLTVLRMNSAEGRKKALATCSSHMTVVTLFYGAAIYTYIFPASLHTPEKDMVVSVFYTILTPLLNPLIYSFRNKNVTEAMKKLLVVSTLF

SEQ ID NO: 1542 - protein, 315 aa, Artificial Sequence; identical to SEQ ID NO: 1541
  Synthetic

SEQ ID NO: 1543 - protein, 320 aa, Artificial Sequence
  Synthetic
MDLTTWMNNYTTQSDFTLVGFFSQSKHPALLAVVIFVVFLMALSGNALLILLILSDIHLHIPMYFFISQLSLMDMMYISVTVPKMLMDQVLGSHKISAAACGMQMFLYLTLAGSEYFLLAAMSYDHYVAICHPLQYPVLMNHRVCLLLMSVCWILGSLDGFMFTPVTMTFPFCGSREIHHFFCEVPAVTKLSCSDTWLYETLMYVCCVLMLLIPVTVISGSYTSILLTVLRMNSAEGRKKALATCSSHMTVVTLYYGAAIYTYIFPASLHTPEKDMVVSMFYTILTPLLNPLIYSFRNKNVTEAMKKLLGVSTLFQETVK

SEQ ID NO: 1544 - protein, 323 aa, Artificial Sequence
  Synthetic
MDLTTWMNNYTTQSDFTLVGFFSQSKHPVLLAVVIFVVFLMALSGNALLILLVLSDTHLHTPMYFFISQLSLMDMMYISVTVPKMLMDQVLGSHKISAAACGMQMFLYLTLAGSEYLLLAAMSYDRYVAICHPLRYPVLMNHRVCLLLMSLCWILGSLDGFMLTPITMTFPFCGSREIHHFFCEVPAVTKLSCSDTWLYETLMYVCCVLMLLIPVTVISGSYTSILLTVLRMNSAEGRKKALATCSSHMTVVTLFYGAAVYTYIFPASLHSPEKDMVVSVFYTILTPLLNPLIYSFRNKNVTEAMKKLLGVKPFFQESLKEVI

SEQ ID NO: 1545 - protein, 318 aa, Artificial Sequence
  Synthetic
MDLTTWMNNSTGQSDFTLVGLFSQSKHPALLAVVIFVVFLMALSGNALLILLILSDTHLHTPMYFFISQLSLMDMMYISVTVPKMLMDQVLGSHKISAAACGMQMFLYLTLVGSEFFLLAAMSYDRYVAICYPLRYPVLMNYRVCLLLMSVCWVLGSLDGFMLTPVTMTFPFCGSREIHHFFCEVPAVTKLSCSDTWLYETLMYVCCVLMLLIPVTVISGSYTSILLTVLRMNSAEGRKKALATCSSHMTVVTLFYGAAVYTYMLPASLHTPEKDMVVSVFYTILTPLLNPLIYSLRNKNVTEAMKKLLGENPSFQKQ

SEQ ID NO: 1546 - protein, 314 aa, Artificial Sequence
  Synthetic
MSNYTGQSYFTLVGLFSQSKHPALLAVVIFVVFLMSLSGNALLILLILSDTHLHTPMYFFISQLSLMDMMYISVTVPKMLMDRVLGNHKISAAACGMQMFLYMSLGGSEFLLLAAMSYDRYVAICHPLRYPVLMNHRVCLLLISTCWILGSLDGFMFTPVTMTFPFCGSREIHHFFCEAPAVTKLSCSDTWLYETLMYVCCVLMILIPVTVISGSYSSILLTVLRMNSAEGRKKALATCSSHMTVVTLFYGAAIYTYIFPASLHSPEKDMVVSVFYTILTPLLNPLIYSLRNKNVTEAMKKLLGIRLHFPETVK

SEQ ID NO: 1547 - protein, 317 aa, Artificial Sequence
  Synthetic
GLFRQSKHNHTGWSDFILLGLFRQSKHPALLCVVIFVVFLMALSGNAVLILLIHCDAHLHTPMYFFISQLSLMDMAYISVTVPKMLLDQVMGVNKISAPECGMQMFFYVTLAGSEFFLLATMAYDRYVAICHPLRYPVLMNHRVCLFLSSGCWFLGSVDGFTFTPITMTFPFRGSREIHHFFCEVPAVLNLSCSDTSLYEIFMYLCCVLMLLIPVVIISSSYLLILLTIHGMNSAEGRKKAFATCSSHLTVVILFYGAAIYTYMLPSSYHTPEKDMMVSVFYTILTPVVNPLIYSLRNKDVMGALKKMLTVPAFQKA

SEQ ID NO: 1548 - protein, 319 aa, Artificial Sequence
  Synthetic
MANITWMANHTGWSDFILLGLFRQSKHPALLCVVIFVVFLMALSGNAVLILLIHCDAHLHTPMYFFISQLSLMDMAYISVTVPKMLLDQVMGVNKISAPECGMQMFFYVTLAGSEFFLLATMAYDRYVAICHPLRYPVLMNHRVCLFLSSGCWFLGSVDGFTFTPITMTFPFRGSREIHHFFCEVPAVLNLSCSDTSLYEIFMYLCCVLMLLIPVVIISSSYLLILLTIHGMNSAEGRKKAFATCSSHLTVVILFYGAAIYTYMLPSSYHTPEKDMMVSVFYTILTPVVNPLIYSLRNKDVMGALKKMLTVPAFQKAME

SEQ ID NO: 1549 - protein, 315 aa, Artificial Sequence
  Synthetic
MANITRMANHTGKLDFILMGLFRRSKHPALLSVVIFVVFLKALSGNAVLILLIHCDAHLHSPMYFFISQLSLMDMAYISVTVPKMLLDQVMGVNKVSAPECGMQMFLYLTLAGSEFFLLATMAYDRYVAICHPLRYPVLMNHRVCLFLASGCWFLGSVDGFMLTPITMSFPFCRSWEIHHFFCEVPAVTILSCSDTSLYETLMYLCCVLMLLIPVTIISSSYLLILLTVHRMNSAEGRKKAFATCSSHLTVVILFYGAAVYTYMLPSSYHTPEKDMMVSVFYTILTPVLNPLIYSLRNKDVMGALKKMLTVRFVL

SEQ ID NO: 1550 - protein, 315 aa, Artificial Sequence
  Synthetic
MANITRMANHTGRLDFILMGLFRQSKHPALLSVVIFVVFLKALSGNAVLILLIHCDAHLHSPMYFFISQLSLMDMAYISVTVPKMLLDQVMGVNKVSAPECGMQMFLYLTLAGSEFFLLATMAYDRYVAICHPLRYPVLMNHRVCLFLASGCWFLGSVDGFMLTPITMSFPFCRSWEIHHFFCEVPAVTILSCSDTSLYETLMYLCCVLMLLIPVTIISSSYLLILLTVHRMNSAEGRKKAFATCSSHLTVVILFYGAAVYTYMLPSSYHTPEKDMMVSVFYTILTPVLNPLIYSLRNKDVMGALKKMLTVRFVL

SEQ ID NO: 1551 - protein, 315 aa, Artificial Sequence
  Synthetic
MANITRMANHTGRLDFILMGLFRRSKHPALLSVVIFVVFLKALSGNAVLILLIHCDAHLHSPMYFFISQLSLMDMAYISVTVPKMLLDQVMGVNKVSAPECGMQMFLYLTLAGSEFFLLATMAYDRYVAICHPLRYPVLMNHRVCLFLASGCWSLGSVDGFMLTPITMSFPFCRSWEIHHFFCEVPAVTILSCSDTSLYETLMYLCCVLMLLIPVTIISSSYLLILLTIHRMNSAAGRKKAFATCSSHLTVVILFYGAAVYTYMLPSSYHTPEKDMMVSVFYTILTPVLNPLIYSLRNKDVMGALKKMLTVRFVL

SEQ ID NO: 1552 - protein, 312 aa, Artificial Sequence
  Synthetic
MRLANQTLGGDFFLLGIFSQISHPGRLCLLIFSIFLMAVSWNITLILLIHIDSSLHTPMYFFINQLSLIDLTYISVTVPKMLVNQLAKDKTISVLGCGTQMYFYLQLGGAECCLLAAMAYDRYVAICHPLRYSVLMSHRVCLLLASGCWFVGSVDGFMLTPIAMSFPFCRSHEIQHFFCEVPAVLKLSCSDTSLYKIFMYLCCVIMLLIPVTVISVSYYYIILTIHKMNSVEGRKKAFTTCSSHITVVSLFYGAAIYNYMLPSSYQTPEKDMMSSFFYTILTPVLNPIIYSFRNKDVTRALKKMLSVQKPPY

SEQ ID NO: 1553 - protein, 312 aa, Artificial Sequence; identical to SEQ ID NO: 1552
  Synthetic

SEQ ID NO: 1554 - protein, 317 aa, Artificial Sequence
  Synthetic
CSGNQTSQNQTASTDFTLTGLFAESKHAALLYTVTFLLFLMALTGNALLILLIHSEPRLHTPMYFFISQLALMDLMYLCVTVPKMLVGQVTGDDTISPSGCGIQMFFHLTLAGAEVFLLAAMAYDRYAAVCRPLHYPLLMNQRVCQLLVSACWVLGMVDGLLLTPITMSFPFCQSRKILSFFCETPALLKLSCSDVSLYKMLTYLCCILMLLTPIMVISSSYTLILHLIHRMNSAAGRRKALATCSSHMIIVLLLFGASFYTYMLRSSYHTAEQDMMVSAFYTIFTPVLNPLIYSLRNKDVTRALRSMMQSRMNQEK

SEQ ID NO: 1555 - protein, 317 aa, Artificial Sequence
  Synthetic
CSGNQTSQNQTASTDFTLTGLFAESKHAALLYTVTFLLFLMALTGNALLILLIHSEPRLHTPMYFFISQLALMDLMYLCVTVPKMLVGQVTGDDTISPSGCGIQMFFYLTLAGAEVFLLAAMAYDRYAAVCRPLHYPLLMNQRVCQLLVSACWVLGMVDGLLLTPITMSFPFCQSRKILSFFCETPALLKLSCSDVSLYKTLMYLCCILMLLAPIMVISSSYTLILHLIHRMNSAAGHRKALATCSSHMIIVLLLFGASFYTYMLPSSYHTAEQDMMVSAFYTIFTPVLNPLIYSLRNKDVTRALRSMMQSRMNQEK

SEQ ID NO: 1556 - protein, 323 aa, Artificial Sequence
  Synthetic
TTVGSMEEYNTSSTDFTFMGLFNRKETSGLIFAIISIIFFTALMANGVMIFLIQTDLRLHTPMYFLLSHLSLIDMMYISTIVPKMLVNYLLDQRTISFVGCTAQHFLYLTLVGAEFFLLGLMAYDRYVAICNPLRYPVLMSRRVCWMIIAGSWFGGSLDGFLLTPITMSFPFCNSREINHFFCEAPAVLKLACADTALYETVMYVCCVLMLLIPFSVVLASYARILTTVQCMSSVEGRKKAFATCSSHMTVVSLFYGAAMYTYMLPHSYHKPAQDKVLSVFYTILTPMLNPLIYSLRNKDVTGALKRALGRFKGPQRVSGGVF

SEQ ID NO: 1557 - protein, 318 aa, Artificial Sequence
  Synthetic
MEEYNTSSTDFTFMGLFNRKETSGLIFAIISIIFFTALMANGVMIFLIQTDLRLHTPMYFLLSHLSLIDMMYISTIVPKMLVNYLLDQRTISFVGCTAQHFLYLTLVGAEFFLLGLMAYDRYVAICNPLRYPVLMSRRVCWMIIAGSWFGGSLDGFLLTPITMSFPFCNSREINHFFCEAPAVLKLACADTALYETVMYVCCVLMLLIPFSVVLASYARILTTVQCMSSVEGRKKAFATCSSHMTVVSLFYGAAMYTYMLPHSYHKPAQDKVLSVFYTILTPMLNPLIYSLRNKDVTGALKRALGRFKGPQRVSGGVF

SEQ ID NO: 1558 - protein, 317 aa, Artificial Sequence
  Synthetic
MEGDNTSSTDFTFMGLFNTEETSGLVFATISVIFLTALVANGIMIFLIHTDAHLHTPMYFLLSHLSFIDMMYISTIVPKMLVDYLLGQRTISFVGCTAQHFLYLTLVGAEFFLLGLMAYDRYVAICNPLRYPVLMSRRICWIIIAGSWFGGSLDGFLLTPITMSFPFCRSREINHFFCEAPAVLKLACADTALYETVMYVCCVLMLLIPFSVVISSYARILATVYHMSSVEGRKKAFATCSSHMTVVTLFYGAAIYTYMVPHSYHSPSQDKIFSVFYTILTPMLNPLIYSMRNKDVSGGLRRALGKIRSSQRVSKDY

SEQ ID NO: 1559 - protein, 317 aa, Artificial Sequence
  Synthetic
MEGDNTSSTDFTFMGLFNTEETSGLVFATISVIFLTALVANGIMIFLIHTDAHLHTPMYFLLSHLSFIDMMYISTIVPKMLVDYLLGQRTISFVGCTAQHFLYLTLVGAEFFLLGLMAYDRYVAICNPLRYPVLMSRRICWIIIAGSWFGGSLDGFLLTPITMSFPFCRSREINHFFCEAPAVLKLACADTALYETVMYVCCVLMLLIPFSVVISSYARILATVYHMSSVEGRKKAFATCSSHMTVVTLFYGAAIYTYMVPHSYHSPSQDKIFSVFYTILTPMLNPLIYSMRNKDVSGGLRRALGKIGSSQRVSKDF

SEQ ID NO: 1560 - protein, 316 aa, Artificial Sequence
  Synthetic
MDGNKTFPSDFTFVGLFTHNKASGFLFSVICATFFMAILANGVMIFLIHIDPHLHTPMYFLLSHLSFIDMMYISTIVPKILVDYIVGKGIISFAACTAQYFLYMGFVGAEFFLLGLMAYDRYVAICNPLRYPVLMSRRVCWFILASSWFGGALDSFLLTPITMSLPFCASHKINHFFCEAPTMLRLACGDKAIYEMVMYICCVVMLLVPFSVVITSYAQILVTVHHIKSEEGRKKAFATCSSHVIVVTLFYGAALYTYMLPQAYHTPLKDKIFSAFYTILTPLLNPVIYSLRNRDVAGALKRVIARHRGACSVERK

SEQ ID NO: 1561 - protein, 308 aa, Artificial Sequence
  Synthetic
MNENNETLTRGFTLMGLFTHNKCSGFFFGVICAVFFMAMIANGVMIFLINIDPHLHTPMYFLLSHLSVIDTLYISTIVPKMLVDYLMGEGTISFIACTAQCFLYMGFMGAEFFLLGLMAYDRYVAICNPLRYPVLISWRVCWMILASSWFGGALDSFLLTPITMSLPFCASHQINHFFCEAPTMLRLACGDKTTYETVMYVCCVAMLLIPFSVVTASYTRILITVHQMTSAEGRKKAFATCSSHMMVVTLFYGAALYTYTLPQSYHTPIKDKVFSAFYTILTPLLNPLIYSLRNRDVMGALKRVVARC

SEQ ID NO: 1562 - protein, 317 aa, Artificial Sequence
  Synthetic
MEQSNYSVYADFILLGLFSNARFPWLLFALILLVFLTSIASNVVKIILIHIDSRLHTPMYFLLSQLSLRDILYISTIVPKMLVDQVMSQRAISFAGCTAQHFLYLTLAGAEFFLLGLMSYDRYVAICNPLHYPVLMSRKICWLIVAAAWLGGSIDGFLLTPVTMQFPFCASREINHFFCEVPALLKLSCTDTSAYETAMYVCCIMMLLIPFSVISGSYTRILITVYRMSEAEGRGKAVATCSSHMVVVSLFYGAAMYTYVLPHSYHTPEQDKAVSAFYTILTPMLNPLIYSLRNKDVTGALQKVVGRCVSSGKVTTF

SEQ ID NO: 1563 - protein, 315 aa, Artificial Sequence
  Synthetic
TNTSSSDFTLLGLLVNSEAAGIVFTVILAVFLGAVTANLVMIFLIQVDSRLHTPMYFLLSQLSIMDTLFICTTVPKLLADMVSKEKIISFVACGIQIFLYLTMIGSEFFLLGLMAYDRYVAVCNPLRYPVLMNRKKCLLLAAGAWFGGSLDGFLLTPITMNVPYCGSRSINHFFCEIPAVLKLACADTSLYETLMYICCVLMLLIPISIISTSYSLILLTIHRMPSAEGRKKAFTTCSSHLTVVSIFYGAAFYTYVLPQSFHTPEQDKVVSAFYTIVTPMLNPLIYSLRNKDVIGAFKKVFACCSSARKVATSDA

SEQ ID NO: 1564 - protein, 315 aa, Artificial Sequence
  Synthetic
TNTSSSDFTLLGLLVNSEAAGIVFTVILAVFLGAVTANLVMIFLIQVDSRLHTPMYFLLSQLSIMDTLFICTTVPKLLADMVSKEKIISFVACGIQIFLYLTMIGSEFFLLGLMAYDCYVAVCNPLRYPVLMNRKKCLLLAAGAWFGGSLDGFLLTPITMNVPYCGSRSINHFFCEIPAVLKLACADTSLYETLMYICCVLMLLIPISIISTSYSLILLTIHRMPSAEGRKKAFTTCSSHLTVVSIFYGAAFYTYVLPQSFHTPEQDKVVSAFYTIVTPMLNPLIYSLRNKDVIGAFKKVFACCSSAQKVATSDA

SEQ ID NO: 1565 - protein, 320 aa, Artificial Sequence
  Synthetic
MGMEGLLQNSTNFVLTGLITHPAFPGLLFAIVFSIFVVAITANLVMILLIHMDSRLHTPMYFLLSQLSIMDTIYICITVPKMLQDLLSKDKTISFLGCAVQIFLYLTLIGGEFFLLGLMAYDRYVAVCNPLRYPLLMNRRVCLFMVVGSWVGGSLDGFMLTPVTMSFPFCRSREINHFFCEIPAVLKLSCTDTSLYETLMYACCVLMLLIPLSVISVSYTHILLTVHRMNSAEGRRKAFATCSSHIMVVSVFYGAAFYTNVLPHSYHTPEKDKVVSAFYTILTPMLNPLIYSLRNKDVAAALRKVLGRCGSSQSIRVATV

SEQ ID NO: 1566 - protein, 319 aa, Artificial Sequence
  Synthetic
MGMEGLLQNSTNFVLTGLITHPAFPGLLFAVVFSIFVVAITANLVMILLIHMDSRLHTPMYFLLSQLSIMDTIYICITVPKMLQDLLSKDKTISFLGCAVQIFYLTLIGGEFFLLGLMAYDRYVAVCNPLRYPLLMNRRVCLFMVVGSWVGGSLDGFMLTPVTMSFPFCRSREINHFFCEIPAVLKLSCTDTSLYETLMYACCVLMLLIPLSVISVSYTHILLTVHRMNSAEGRRKAFATCSSHIMVVSVFYGAAFYTNVLPHSYHTPEKDKVVSAFYTILTPMLNPLIYSLRNKDVAAALRKVLGRCGSSQSIRVATV

SEQ ID NO: 1567 - protein, 314 aa, Artificial Sequence
  Synthetic
MMERENYTFNSDFILLGLFSSSKISLTFFSVIFFIFIMTITENALMILLIHRDSRLHTPMYFLLSHLSFMDILHISNIVPKMIADFLSGSRTISFAGCAFQIFLSLTLLGGECLLLAVMSYDRYVAICHPLRYPVLMRDNFSRLLAAGSWLVGILNSIVHTAFVLHFPFCHSRAIDHFFCEVPAMLKLSCIDTTHYERGVYVSGIIFLLIPFSMISISYVQILLTVFQMHSSGARQKSFSTCLFHMVVVIMYYGPFIFTYMRPRSYHTPGQDKFLAIFYTILTPTLNPIIYSFRNKDVLMALKNIVQSNILNKE

SEQ ID NO: 1568 - protein, 313 aa, Artificial Sequence
  Synthetic
MMEYENYTFNDFILLGLFSSSKTSLTFFSVIFFIFIMAITENALMILLIHRDSRLHTPMYFLLSHLSFMDILHISNIVPKMIADFLSGSRTISFAGCAFQIFLSLTLLGGECLLLAAMSYDRYVAICHPLCYPVLMRDNFSRLLAAGSWLVGILNSIVHTAFVLHFPFCHSRAIDHFFCEVPAMLKLSCIDTTHYEQGVYVSGIIFLMVPFSMISISYVQILLTVFQMHSSGARQKSFSTCLFHMVVVIMYYGPVIFTYMRPRSYHTPGQDKFLAIFYTILTPKLNPIIYSFRNKDVLRALKNIVQSNILNKK

SEQ ID NO: 1569 - protein, 314 aa, Artificial Sequence
  Synthetic
MMEYENYTFNSDFILLGLFSSSKTSLTFFSFIFFIFIMAITENALMILLIHRDSRLHTPMYFLLSHLSFMDILHISNIVPKMIADFLSGSRTISFAGCAFQIFLSLTLLGGECLLLAAMSYDRYVAICHPLRYPVLMRDNSSRLLAAGSWLVGILNSIVHTVFALHFPFCHSRAIDHFFCEVPAMLKLSCIDTTHYERGVYVSGIIFLLIPFSMISISYVQILLTVFQMQSSGARQKSFSTCSFHMVVVIMYYGPFIFTYMRPRSYHTPGQDKFLAIFYTILTPTLNPIIYSFRNKDVLMAVKNIVQSNFLNKK

SEQ ID NO: 1570 - protein, 320 aa, Artificial Sequence
  Synthetic
MMGHQNHTFSSDFILLGLFSSSPTSVVFFLVLFVIFIMSVTENTLMILLIRSDSRLHTPMYFLLSHLSLMDILHVSNIVPKMVTNFLSGSRTISFAGCGFQVFLSLTLLGGECLLLAAMSCDRYVAICHPLRYPILMKEYASALMAGGSWLIGVFNSTVHTAYALQFPFCGSRAIDHFFCEVPAMLKLSCADTTRYERGVCVSAVIFLLIPFSLISASYGQIILTVLQMKSSEARKKSFSTCSFHMIVVTMYYGPFIFTYMRPKSYHTPGQDKFLAIFYTILTPTLNPFIYSFRNKDVLAVMKNMLKSLHKKMNRKIPEC

SEQ ID NO: 1571 - protein, 318 aa, Artificial Sequence
  Synthetic
MWQKNQTSLADFILEGLFDDSLTHLFLFSLTMVVFLIAVSGNTLTILLICIDPQLHTPMYFLLSQLSLMDLMHVSTIILKMATNYLSGKKSISFVGCATQHFLYLCLGGAECFLLAVMSYDRYVAICHPLRYAVLMNKKVGLMMAVMSWLGASVNSLIHMAILMHFPFCGPRKVYHFYCEFPAVVKLVCGDITVYETTVYISSILLLLPIFLISTSYVFILQSVIQMRSSGSKRNAFATCGSHLTVVSLWFGACIFSYMRPRSQCTLLQNKVGSVFYSIITPTLNSLIYTLRNKDVAKALRRVLRRDVITQCIQRLQL

SEQ ID NO: 1572 - protein, 318 aa, Artificial Sequence
  Synthetic
MWQKNQTSLADFILEGLFDDSLTHLFLFSLTMVVFLIAVSGNTLTILLICIDPQLHTPMYFLLSQLSLMDLMHVSTTILKMATNYLSGKKSISFVGCATQHFLYLCLGGAECFLLAVMSYDRYVAICHPLRYAVLMNKKVGLMMAVMSWLGASVNSLIHMAILMHFPFCGPRKVYHFYCEFPAVVKLVCGDITVYETTVYISSILLLLPIFLISTSYVFILQSVIQMRSSGSKRNAFATCGSHLTVVSLWFGACIFSYMRPRSQCTLLQNKVGSVFYSIITPTLNSLIYTLRNKDVAKALRRVLRRITQCIQRLQLWL

SEQ ID NO: 1573 - protein, 306 aa, Artificial Sequence
  Synthetic
MESGNHSCGTEFTLVGLFQYGHMDTFLFTLIAILFAVALMGNITLVLLIRLDRRLHTPMYFFLSQLSIIDMMYISTTVPKMAANFLSDTKAISFLGCAVQTFVFLTLGGSEALLLGFMSYDRYIAICQPLHYPVLMSRKICCSMVAGAWSSSSINAFMHTVYVFQLPFCGSRMVNHFFCEVPSLLPLVCEDTSQYEHTVLVSGLVILLLPFLAILASYARVLVVVLQMGSGKGQSRAVSTCSSHLTVASLFYVTTLSTYTQPHSLHSPGRDKVVAVLYSIVTPVLNPFIYSLRNKEVMGALRRQRG

SEQ ID NO: 1574 - protein, 306 aa, Artificial Sequence
  Synthetic
MESGNHSCGTEFTLVGLFQYGHMDTFLFTLIAILFAVALMGNITLVLLIRLDRRLHTPMYFFLSQLSIIDMMYISTTVPKMAANFLSDTKAISFLGCAVQTFVFLTLGGSEALLLGFMSYDRYIAICQPLHYPVLMSRKICCSMVAGAWSSSSINAFMHTVYVFQLPFCGSRMVNHFFCEVPSLLPLVCEDTSQYEHTVLVSGLVILLLPFLAILASYARVLVVVIQMGSGKGQSRAVSTCSSHLTVASLFYVTTLSTYTQPHSLHSPGRDKVVAVLYSIVTPVLNPFIYSLRNKEVMGALRRQRG

SEQ ID NO: 1575 - protein, 306 aa, Artificial Sequence
  Synthetic
METGNRSCGTDFSLVGLFQDGHMDTFLFTLIAILFAVAFIGNITLVLLIRLDCRLHTPMYFLLSQLSIIDMMYISTTVPKVAANFLSDTKAISFLGCAVQAFVFLTLGGSEALLLGFMSYDRYIAICRPLHYPVLMSRKICCSMVAGAWSSSSINAFMHTVYVFQLPFCGSRMVNHFFCEVPSLLPLVCEDTSQYEHTVLVSGLVILLLPFLAILASYARVLVVVLQMGSGKGQSRAVSTCSSHLTVASLFYVTGLSTYTQPHSLHSPGRDKVVAVLYSIVTLVLNPFIYSLRNKEVMGALRRQMG

SEQ ID NO: 1576 - protein, 306 aa, Artificial Sequence
  Synthetic
MESGNRSCGTDFTLVGLFQDGHMDTFLFTVISILFAVALIGNITLVILIRLDQRLHTPMYFLLSQLSIMDMMYISTTVPKMAANFLSDTKAISFLGCVIQAFVFLTLGGSEALLLGFMSYDRYIAICRPLHYPVLMSRKICCSMVASAWSSSSITASVHTVYVFQLPFCGSRMVNHFFCEVPSLLPLVCEDTSQYEHTVLVSGLVILLLPFLAILASYARVLVVVIQMGSGKGQSRAVSTCSSHLTVASLFYVTTLSTYTQPHTLHSPGRDKVVAVLYSIVTPVLNPFIYSLRNKEVMGALRRQMK

SEQ ID NO: 1577 - protein, 306 aa, Artificial Sequence
  Synthetic
METGNHSCGTDFTLVGLFQYGHMDTFLFTVISILFAVALIGNITLVLLIRLDRRLHTPMYFFLSQLSIIDMMCISTTVPKMGANFISDTKAISVLGCEIQVFMFMSLAGCEALLLGFMSYDRYIAICQPLHYPVLMSRKICCSMVASAWSSSSINALAHTVYVFQLPFCGSRMVNHFFCEVPSLLPLVCEDTSQYEHMIVMSVLVLVLLPFLAILASYARVLVVVFQMGSGQGQSRAVSTCSSHLTVASLFYVTGLCTYTQPHSLHSPGRDKVVAVLYSIVTPVLNPFIYSLRNKEVIGALRRQMG

SEQ ID NO: 1578 - protein, 319 aa, Artificial Sequence
  Synthetic
MKTGNQSFGTDFLLVGLFQYGWINSLLFVVIATLFTVALTGNIMLIHLIRLNTRLHTPMYFLLSQLSIVDLMYISTTVPKMAVSFLSQSKTIRFLGCEIQTYVFLALGGTEALLLGFMSYDRYVAICHPLHYPMLMSKKICCLMVACAWASGSINAFIHTLYVFQLPFCRSRLINHFFCEVPALLSLVCQDTSQYEYTVLLSGLIILLLPFLAILASYARVLIVVFQMSSGKGQAKAVSTCSSHLIVASLFYATTLFTYTRPHSLRSPSRDKAVAVFYTIVTPLLNPFIYSLRNKEVTGAVRRLLGYWICCRKYDFRSL

SEQ ID NO: 1579 - protein, 312 aa, Artificial Sequence
  Synthetic
MENYNQTSTDFILLGLFPPSRIDLFFFILIVFIFLMALIGNLSMILLIFLDTHLHTPMYFLLSQLSLIDLNYISTIVPKMASDFLHGNKSISFTGCGIQSFFFLALGGAEALLLASMAYDRYIAICFPLHYLIRMSKRVCVLMITGSWIIGSINACAHTVYVLHIPYCRSRAINHFFCDVPAMVTLACMDTWVYEGTVFLSATIFLVFPFIGISCSYGQVLFAVYHMKSAEGRKKAYLTCSTHLTVVTFYYAPFVYTYLRPRSLRSPTEDKVLAVFYTILTPMLNPIIYSLRNKEVMGALTRVSQRICSVKM

SEQ ID NO: 1580 - protein, 311 aa, Artificial Sequence
  Synthetic
MENYNQTSTDFILLGLFPPSRIDLFFFILIVFIFLMALIGNLSMILLIFLDTHLHTPMYFLLSQLSLIDLNYISTIVPKMASDFLHGNKSISFTGCGIQSFFFLALGGAEALLLASMAYDRYIAICFPLHYLIRMSKRVCVLMITGSWIIGSINACAHTVYVLHIPYCRSRAINHFFCDVPAMVTLACMDTWVYECTVFLSTTIFLVFPFIGISCSCGQVLFAVYRMKSAEGRKKAYLTCSTHLTVVTFYYAPFVYTYLRPRSLRSPTEDKVLAVFYTILTPMLNPIISLRNREVMGALTRVSQRICSVKM

SEQ ID NO: 1581 - protein, 312 aa, Artificial Sequence
  Synthetic
MENYNQTSTDFILLGFFPPSRIGLFLFILIVFIFLMALIGNLSMILLIFLDTHLHTPMYFLLSQLSLIDLNYISTIVPKMASDFLSGNKSISFTGCGIQSFFFSALGGAEALLLASMAYDRYIAICFPLHYPIRMSKRMCVLMITGSWIIGSINACAHTVYVLHIPYCQSRAINHFFCDVPAMVTLACMDTWVYEGTVFLSTTIFLVFPFIAISCSYGRVLLAVYHMKSAEGRKKAYLTCSTHLTVVTFYYAPFVYTYLRPRSLRSPTEDKVLAVFYTTLTPMLNPIIYSLRNKEVMGALTRVSQRICSGKM

SEQ ID NO: 1582 - protein, 312 aa, Artificial Sequence
  Synthetic
MENYNQTSTDFILLGLFPPSKIGLFLFILFVLIFLMALIGNLSMILLIFLDTHLHTPMYFLLSQLSLIDLNYISTIVPKMASDFLYGNKSISFIGCGIQSFFFMTFAGAEALLLTSMAYDRYVAICFPLHYPIRMSKRMYVLMITGSWMIGSINSCAHTVYAFRIPYCKSRAINHFFCDVPAMLTLACTDTWVYEYTVFLSSTIFLVFPFTGIACSYGWVLLAVYRMHSAEGRKKAYSTCSTHLTVVTFYYAPFAYTYLCPRSLRSLTEDKVLAVFYTILTPMLNPIIYSLRNKEVMGALTRVIQNIFSVKM

SEQ ID NO: 1583 - protein, 312 aa, Artificial Sequence
  Synthetic
MENYNQTSTDFILLGLFPQSRIGLFVFTLIFLIFLMALIGNLSMILLIFLDIHLHTPMYFLLSQLSLIDLNYISTIVPKMVYDFLYGNKSISFTGCGIQSFFFLTLAVAEGLLLTSMAYDRYVAICFPLHYPIRISKRVCVMMITGSWMISSINSCAHTVYALCIPYCKSRAINHFFCDVPAMLTLACTDTWVYESTVFLSSTIFLVLPFTGIACSYGRVLLAVYRMHSAEGRKKAYSTCSTHLTVVSFYYAPFAYTYVRPRSLRSPTEDKILAVFYTILTPMLNPIIYSLRNKEVMGALTQVIQKIFSVKM

SEQ ID NO: 1584 - protein, 312 aa, Artificial Sequence
  Synthetic
MDSYNQTFTGFILLGLFPPSKIGLFLFILIVLIFLTAWIGNLSMILLILLDSHLHTPMYFLLSQLSLIDLNYISTIVPKMVSDFMLGNKYISFIGCGFQIFLFLTFGGAETLLLASMAYDRYVAICFPLHYATHMNKRVCVMMITGAWILGSINSCAHTGYALQIPYCRSRAINHFFCDVPAMLTLACTDTWVYEYTVFVSTILFLVFPFIGIVCSYGRVFLAIYRMHSRAGKKKAYSTCSTHLTVVTFYYAPFAYTYLRPRSLRSPEEDKILAVFYTVLTPMLNPIIYSLRNKEVIGALRRMTHRICFAKI

SEQ ID NO: 1585 - protein, 312 aa, Artificial Sequence; identical to SEQ ID NO: 1584
  Synthetic

SEQ ID NO: 1586 - protein, 312 aa, Artificial Sequence
  Synthetic
MEKWNQSSSDFTLLGLLPQNQTGLLLLMLIIFVFSLALCGNSGMIHLIRVDPRLHTPMYFLLSQLSLMDLMYISTTVPKMAFNFLSGQKSISFLGCGVQSFFFLTMACSEGLLLASMAYDRFVAICHPLHYPIRMSKIMCLKMIIGSWILGSINSLAHTVYALHIPYCHSRSINHFFCDVPAMLPLACMDTWVYEYMVFVSTSLFLLLPFLGITASYGRVLFAVFHMRSKEGKKKAFTTCSTHLTVVTFYYAPFVYTYLRPRSLRSPTEDKILAVFYTILTPMLNPIIYSLRNKEVLGAMTRVLGTFPSTKP

SEQ ID NO: 1587 - protein, 312 aa, Artificial Sequence; identical to SEQ ID NO: 1586
  Synthetic

SEQ ID NO: 1588 - protein, 312 aa, Artificial Sequence
  Synthetic
MEKWNQSSSDFILLGLLPQNQTGLLLMMLIILVFFLALFGNSAMIHLIRVDPRLHTPMYFLLSQLSLMDLMYISTTVPKMAFNFLSGQKNISFLGCGVQSFFFLTMAGSEGLLLASMAYDRFVAICHPLHYPIRMSKIMCLKMIIGSWILGSINSLAHSIYALHIPYCHSRSINHFFCDVPAMLPLACMDTWVYEYMVFVSTSLFLLLPFLGITASYGRVLFAVFHMRSKEGKKKAFTTCSTHLTVVTFYYAPFVYTYLRPRSLRSPTEDKILTVFYTILTPMLNPIIYSLRNKEVLGAMTRVLGTFSSMKP

SEQ ID NO: 1589 - protein, 312 aa, Artificial Sequence; identical to SEQ ID NO: 1588
  Synthetic

SEQ ID NO: 1590 - protein, 312 aa, Artificial Sequence
  Synthetic
MEKWNHTSNDFILLGLLPPNQTGIFLLCLIILIFFLASVGNSAMIHLIHVDPRLHTPMYFLLSQLSLMDLMYISTTVPKMAYNFLSGQKGISFLGCGVQSFFFLTMACSEGLLLTSMAYDRYLAICHSLYYPIRMSKMMCVKMIGGSWTLGSINSLAHTVFALHIPYCRSRAIDHFFCDVPAMLLLACTDTWVYEYMVFVSTSLFLLFPFIGITSSCGRVLFAVYHMHSKEGRKKAFTTISTHLTVVIFYYAPFVYTYLRPRNLRSPAEDKILAVFYTILTPMLNPIIYSLRNKEVLGAMRRVFGIFSFLKE

SEQ ID NO: 1591 - protein, 315 aa, Artificial Sequence
  Synthetic
MLRNGSIVTEFILVGFQQSSSTRALLFALFLALYSLTMAMNGLIIFITWTDPKLNSPMYFFLGHLSLLDVCFITTTIPQMLIHLVVRDHIVSFVCCMTQMYFVFCVGVAECILLAFMAYDRYVAICYPLNYVPIISQKVCVRLVGTAWFFGLINGIFLEYISFREPFRRDNHIESFFCEAPIVIGLSCGDPQFSLWAIFADAIVVILSPMVLTVTSYVHILATILSKASSSGRGKTFSTCASHLTVVIFLYTSAMFSYMNPHSTHGPDKDKPFSLLYTIITPMCNPIIYSFRNKEIKEAMVRALGRTRLAQPQSV

SEQ ID NO: 1592 - protein, 314 aa, Artificial Sequence
  Synthetic
MTNQTQMMEFLLVRFTENWVLLRLHALLFSLIYLTAVLMNLVIILLMILDHRLHMAMYFFLRHLSFLDLCLISATVPKSILNSVASTDSISFLGCVLQLFLVVLLAGSEIGILTAMSYDRYAAICCPLHCEAVMSRGLCVQLMALSWLNRGALGLLYTAGTFSLNFYGSDELHQFFCDVPALLKLTCSKEHAIISVSVAIGVCYAFSCLVCIVVSYVYIFSAVLRISQRQRQSKAFSNCVPHLIVVTVFLVTGAVAYLKPGSDAPSILDLLVSVFYSVAPPTLNPVIYCLKNKDIKSALSKVLWNVRSSGVMKR

SEQ ID NO: 1593 - protein, 315 aa, Artificial Sequence
  Synthetic
MTNQTQMMEFLLVRFTENWVLLRLHALLFSLIYLTAVLMNLVIILLMILDHRLHMAMYFFLRHLSFLDLCLISATVPKSILNSVASTDSISFLGCVLQLFLVVLLAGSEIGILTAMSYDRYAAICCPLHCEAVMSRGLCVQLMALSWLNRGALGLLYTAGTFSLNFYGSDELHQFFCDVPALLKLTCSKEHAIISVSVAIGVCYAFSCLVCIVVSYVYIFSAVLRISQRQRQSKAFSNCVPHLIVVTVFLVTGAVAYLKPGSDAPSILDLLVSVFYSVAPPTLNPVIYCLKNKDIKSALSKVLWNVRSSGVRKRL

SEQ ID NO: 1594 - protein, 293 aa, Artificial Sequence
  Synthetic
MGFSNSWDIQIVHAALFFLVYLAAVIGNLLIIILTTLDVHLQTPMYFFLRNLSFLDFCYISVTIPKSIVSSLTHDTSISFFGCALQAFFFMDLATTEVAILTVMSYDRYMAICRPLHYEVIINQGVCLRMMAMSWLSGVICGFMHVIATFSLPFCGRNRIRQFFCNIPQLLSLLDPKVITIEIGVMVFGTSLVIISFVVITLSYMYIFSVIMRIPSKEGRSKTFSTCIPHLVVVTLFMISGSIAYVKPISNSPPVLDVFLSAFYTVVPPTLNPVIYSLRNRDMKAALRRQCGP

SEQ ID NO: 1595 - protein, 293 aa, Artificial Sequence; identical to SEQ ID NO: 1594
  Synthetic

SEQ ID NO: 1596 - protein, 315 aa, Artificial Sequence
  Synthetic
MTDTITNTTEYMEFLLMGYPDEQVLQTLCATLFFLIYLGALVGNFLIITITTIDQHLQSPMYFFLKNLSLIDICYISVTVPKSIMNSVTNTHSISFLGCVLQVFCVIFLAGTEFALLLVMSYDRYAAICFPLHYEAIMNKEACVQMVAAAWLSGCVYGSVHATGTFSVHFCGPNVVYQFFCDIPSLLRLACFGDQILEYVFIITSCCFAFMCFILMVISYVHIFTIILRIPSIQGRFKIFSTCIPHLTVVTLFLSSGFVAYLGSAVKSPSSLNLFMSVFYSLLPPSLNPGIYSFRNSDVKVALHNIFGEKMTTRF

SEQ ID NO: 1597 - protein, 307 aa, Artificial Sequence
  Synthetic
NLTIVTEFILMGFSTNKNMCILHSILFLLIYLCALMGNVLIIMITTLDHHLHTPVYFFLKNLSFLDLCLISVTAPKSIANSLIHNNSISFLGCVSQVFLLLSSASAELLLLTVMSFDRYTAICHPLHYDVIMDRSTCVQRATVSWLYGGLIAVMHTAGTFSLSYCGSNMVHQFFCDIPQLLAISCSENLIREIALILINVVLDFCCFIVIIITYVHVFSTVKKIPSTEGQSKAYSICLPHLLVVLFLSTGFIAYLKPASESPSILDAVISVFYTMLPPTFNPIIYSLRNKAIKVALGMLIKGKLTKK

SEQ ID NO: 1598 - protein, 308 aa, Artificial Sequence
  Synthetic
MANLTIVTEFILMGFSTNKNMCILHSILFLLIYLCALMGNVLIIMITTLDHHLHTPVYFFLKNLSFLDLCLISVTAPKSIANSLIHNNSISFLGCVSQVFLLLSSASAELLLLTVMSFDRYTAICHPLHYDVIMDRSTCVQRATVSWLYGGLIAVMHTAGTFLSYCGSNMVHQFFCDIPQLLAISCSENLIREIALILINVVLDFCCFIVIIITYVHVFSTVKKIPSTEGQSKAYSTCLPHLLVVLFLSTGFIAYLKPASESPSILDAVISVFYTMLPPTFNPIIYSLRNKAIKVALGMLIKGKLTKK

SEQ ID NO: 1599 - protein, 309 aa, Artificial Sequence
  Synthetic
NLTKVTEFLLMEFSGIWELQVLHAGLFLLIYLAVLVGNLLIIAVITLDQHLHTPMYFFLKNLSVLDLCYISVTVPKSIRNSLTRRSSISYLGCVAQVYFFSAFASAELAFLTVMSYDRYVAICHPLQYRAVMTSGGCYQMAVTTWLSCFSYAAVHTGNMFREHVCRSSVIHQFFRDIPHVLALVSCEVFFVEFLTLALSSCLVLGCFILMMISYFQIFSTVLRIPSGQSRAKAFSTCSPQLIVIMLFLTTGLFAALGPIAKALSIQDLVIALTYTVLPPFLNPIIYSLRNKEIKTAMWRLFVKIYFLQK

SEQ ID NO: 1600 - protein, 322 aa, Artificial Sequence
  Synthetic
MEDSSMSNDTRITGFILMGFSAAPELQTVCGLFFLVMYVAVIMSNLLLITLITLDLKLQTPMYFFLKNLSLLDIFFISVPIPNFFINSITHNNSISILGCALQVFLMTSFASGDVFVLTAMSYDHYVAICCPLHYETIMSSGNCVLMVGVSWAIGVLFGALYTAGTFSMPFCGSIVIPQFFCDVPSLLRISCSDILVVIYTSLGMGVCLGMSCFICVVISYFYIFSTVLKIPTTKGQSKAFATCLPHLTVFSVFIVTACFVYLKPPSVVPSISDRLFSVLHTVLPPALNPVIYSLRNSDVKRALKRLQQNLCPSGSLHVTIQ

SEQ ID NO: 1601 - protein, 314 aa, Artificial Sequence
  Synthetic
NATRITGFILMGFSVAPELQTVCGLFLLVMYLAVIMSNLLLITLITLDLKLQTPMYFFLKNLSLLDVFFISVPIPNFFINSITHNNSISILGCALQLFLMTSFGAGDVFVLTAMSYDRYVAICCPLHYETIMSSRNCMLMVGVSWATGILFGALYTAGTFSMPFCGSMVIPQFFCDVPSLLRISCSDTLVVIYISLGIGFCLGMVCIICVVLSYFYIFSTVLKIPTTKGQYKAFGTCIPHLTVFSVFIATACFVNLKPPSRSASIADSLFSVLYTVLPPALNPVIYSLRNTDVKCALRSLQKILCPRDSLHLRV

SEQ ID NO: 1602 - protein, 315 aa, Artificial Sequence
  Synthetic
NDTRVTGFILMGFSAAPELQTVCGLFFLVMYLAVIMSNLLIITVITLDLKLQTPMYFFLKNLSLLDVFLVSIPIPKFIINNLTHNNYISILGCAFQILLMTSFSAGEIFVLTAMSYDRYVAICSPLCYEAIMSSGNCVLMVGVSWATGILFGALYTAGTFSMPFCGSMVIPQFFCDVPSLLRISCSGSLMIIYISLGIGMCLCMSCFYCVMISYFYIISTVLKIPTTRGQSKAFATCIPHLTVFSVFIATACFVYLKPPSDIPSITDRLFSVLYTVLPPALNPVIYSLRNSDVKCSLRRLQQNLCPRDSYYLTVQ

SEQ ID NO: 1603 - protein, 313 aa, Artificial Sequence
  Synthetic
MPNITAFTGFLLTAFFDSQELQTLWGVFFLGIYLEALMSNLIIITLITLDLQLQTPMYFFLKNLSLLDVFFVSVPIPKFVVNSLIHNNSISVLACAFQVFLMTSFSSGEVFVLTAMSYDRYVAICFPLNYGAIMNNHTCVLMMGVSWATGMLFGAIYTAGTFSMPFCGSNVIPQFFCDVPSLLRISCSETLVAIYSCLGIGVCLGMSCFICVVISYFYIFSTVLKIPTTKGQSKAFATCIPHLTVFTVFLVTACFVYLKPFTNTLSISERLFSVLYTVLPPALNPLIYSLRNTDVKSALRRLQQNLCLRRLLI

SEQ ID NO: 1604 - protein, 311 aa, Artificial Sequence
  Synthetic
NITAFTGFLLTAFFDSQELQTLWGVFFLGIYLEALMSNLIIITLITLDLQLQTPMYFFLKNLSLLDVFFVSVPIPKFVVNSLIHNNSISVLACAFQVFLMTSFSSGEVFVLTAMSYDRYVAICFPLNYGAIMNNHTCVLMMGVSWATGMLFGAIYTAGTFSMPFCGSNVIPQFFCDVPSLLRISCSETLVAIYSCLGIGVCLGMSCFICVVISYFYIFSTVLKIPTTKGQSKAFATCIPHLTVFTVFLVTACFVYLKPFTNTLSISERLFSVLYTVLPPALNPLIYSLRNTDVKSALRRLQQNLCLRRLLI

SEQ ID NO: 1605 - protein, 315 aa, Artificial Sequence
  Synthetic
NVTAVTGFILMGFSDIHELQILCGVLFLVLYLGILMSNLLIIILITVDLKLQTPMYFFLKNLSLLDVFLVSVTIPNFFVNSLMHKNSISILGCAFQVFFMALLGSGEVFVLTTMSYDRYVAICSPLHYEVIMNSVTCVVMMSVSWGTGLFFGVMYTAGTFSMTFCGSNVIPQIFCDVPSLLRISCSGSLMIIYISLGIGVCLGMSCFICVVISYIYIFSTVLKIPTTKGQSKAFGTCIPHLTVFSVFIATACFVYLKPPSNSASLTDRLFSVLYTVLPPALNPVIYSLRNNDVDSALKRLLQNLYSRDFLHVIHQ

SEQ ID NO: 1606 - protein, 314 aa, Artificial Sequence
  Synthetic
MANVTLVTGFLLMGFSNIQKLRILYGVLFLLIYLAALMSNLLIITLITLDVKLQTPMYFFLKNLSFLDVFLVSVPIPKFIVNNLTHNNSISILGCAFQLLLMTSFSAGEIFILTAMSYDRYVAICCPLNYEVIMNTGVCVLMASVSWAIGGLFGTAYTAGTFSMPFCGSSVIPQFFCDVPSLLRISCSETLMVIYAGIGVGACLSISCFICIVISYIYIFSTVLKIPTTKGQSKAFSTCFPHLTVFTVFIITAYFVYLKPPSNSPSVIDRLLSVIYTVMPPVFNPVTYSLRNNDMKCALIRLLQKTYGQEAYFI

SEQ ID NO: 1607 - protein, 312 aa, Artificial Sequence
  Synthetic
MIVENITTMRGFLLMGFSDNHELQILQALLFLVTYLLGSAGNVIIITITTLDPQLQSPMYYFLKHLSILDLSSLSVTVPQYVDICLTQSGYISYAQCMLQIFFFTGFAWGEVAILTVMSYDRYVAVCLPLHYEVIMGPSKCRWAVTAVWLSSVIPGTLYIASIFSIRFCGDRIIHQFFCDVPQVLKFSCSDDYLVTVGVADFLSAVAFACFIGIVNSYVHIFSTVLRMPSAESRSKVFSTCLPHLFVVLLFLSTGIFAYLNPTSDSPTALQFLVSIFYTVLPPTLNPVIYSLRNETIKSVIRKLLLSSKFTG

SEQ ID NO: 1608 - protein, 312 aa, Artificial Sequence
  Synthetic
MIMENITTMSGFLLMGFSDNHELQILQAVLFLVTYLVGSAGNVIIITITTLDPQLQSPMYYFLKQLSILDLSSLSVTVPQYVDSSLARSGYISYGQCMLQIFFFTWFAWGEMAILTVMSYDRYIAVCLPLHYEIIMCPRKCRWAVTAVWLSSSIPGTLYLATIFSIRICRAKIIHQFFCDVPQLLKLSCSNDYLVIMGVADFLSVIGFACFVGIVISYVHIFSTVLRMPSAESRSKVFSTCLPHLFVVSLFLSTGIFAYLNPTSDFPTALEFLFSVFYTVLPPTLNPVIYSLRNDAIKSVVRKLLLSRKFTS

SEQ ID NO: 1609 - protein, 319 aa, Artificial Sequence
  Synthetic
MTVKNITTMSGFLLMGFSDNRELQILYALLFLLTYLLGSAGNFIIITITTLDPQLQSPMYYFLKHLSILDLSSLSVTVPQYVDSSLAGSGYISYGQCMLQIFFFAAFAWGEVAILTVMSYDRYVAICLPLHYEVIMSPRKCTWAVTSVWLSSVIPGTLYIASIFSIRFCRAKIIHQLFCDVPQLLKLSCSNDHLVVIGMVSFMTAVAFACFVGIVISYVHIFSTVLRMPSAESRSKVFSTCLPHLFVVSLFLSTGSCAYLNTSSDSPTALEFLFSIFYTVLPPTLNPVIYSLRNETIKSVVRKLLLSSKFTVRIICPVA

SEQ ID NO: 1610 - protein, 312 aa, Artificial Sequence
  Synthetic
MIMENITTMSGFLLMGFSDNRELQILQALLFLVTYLVGSAGNCIIITITTLDPQLKSPMYYFLKHLSILDLSSLSVTVPQYVDSSLARSGYISYEQCMLQILFFTCFAWDEMAILTVMSYDRYVAVCLPLHYEVIMSPRKCTWALAAVWLSGGVSGTLYTASTLSIRFCGDRIIHQFFCDVPQVLKLSCSNDYLVTIGVANILSAVAFACFIGIVISYVHIFSTVLRMPSAESRYKVFSTCLPHLFVVSLFLSTSTFAYLNPTADSPTALEFLFSILYTVLPPTINPVIYSLRNETIKRVVRKLLSSTKFTV

SEQ ID NO: 1611 - protein, 308 aa, Artificial Sequence
  Synthetic
MTPRNMTTMSGFLLMGFSDNHELQILQALLFLLTYLLGSAGNFIIITITTLDPQLQSPMYYFLKHLSILDLSSLSVTVPQYVDSSLARSGYISYGQCMLQIFFFTGLAWSEVALLTVMSYDRYVAICLPLHYEVIMSPRKCTWAVAAVWLSGGISGTLFTASTLSIRFCGHKIIHQFFCDIPQLLKLSCSNDDFGLLKVSTFIAVMGFACFMGIAFSYGQIFSTVLRMPSAEGRSKVFSTCLPHLFVVSFFLSTGICAYLKPTSDSPTTLDFMLSIFYTVLPPTLNPVIYSLRNQSLKRAIKKLLLSE

SEQ ID NO: 1612 - protein, 319 aa, Artificial Sequence
  Synthetic
MTARNMTTMSGFLLMGFSDNHELQILQALLFLLTYLLGSAGNFIIITITTLDPQLQSPMYYFLKQLSTLDLSSLSVTVPQYVASSLARSGYISYGQCMLQIFFFTGLAWSEMATLTVMSYDRYVAICLPLHYEVIMSPRKCTWAVAAVWLSGGISGTLFTASTLSIRFCGDKIIHQFFCDIPQLLKLSCSNDYFGVLEVSTFMSVMAFACFVGIAFSYGQIFSTVLRMPSAEGRSKVFSTCLPHLFVVSFFLSTGICAYLKPTSDSPTALDLMLSIFYTLLPPTLNPVIYSLRNESLKRALKKLLLSEEFIRKKCLFYF

SEQ ID NO: 1613 - protein, 319 aa, Artificial Sequence; identical to SEQ ID NO: 1612
  Synthetic

SEQ ID NO: 1614 - protein, 319 aa, Artificial Sequence
  Synthetic
MTARNMTTMSGFLLVGFSDNHELQILQALLFLVTYLLGSAGNFIIITITTLDPQLQSPMYYFLKHLSILDLSSLSVTIPQYVDSSLARSGYISYAQCMLQIFFFASFAWGELGTLTVMSYDRYVAICLPLHYEVIMSPRKCTWAVAAVWLSGGISGTLFTASTLSIRFCGDKIIHQFFCDIPQLLKLSCSNDDFGVLEVSIFMAVMAFACFMGIAFSYGQIFSTVLRMPSAEGRSKVFSTCLPHLFVVSFFLSTGSCAYLKPTSDSPTASDLMLSIFYTVLPPTLNPFIYSLRNKSLKEAVKKLLLSEELVGKIYVCSV

SEQ ID NO: 1615 - protein, 323 aa, Artificial Sequence
  Synthetic
GIFRETMVNLTSMSGFLLMGFSDERKLQILHALVFLVTYLLALTGNLLIITIITVDRRLHSPMYYFLKHLSLLDLCFISVTVPQSIANSLMGNGYISLVQCILQVFFFIALASSEVAILTVMSYDRYAAICQPLHYETIMDPRACRHAVIAVWIAGGLSGLMHAAINFSIPLCGKRVIHQFFCDVPQMLKLACSYEFINEIALAAFTTSAAFICLISIVLSYIRIFSTVLRIPSAEGRTKVFSTCLPHLFVATFFLSAAGFEFLRLPSDSSSTVDLVFSVFYTVIPPTLNPVIYSLRNDSMKAALRKMLSKEELPQRKMCLKA

SEQ ID NO: 1616 - protein, 317 aa, Artificial Sequence
  Synthetic
MVNLTSMSGFLLMGFSDERKLQILHALVFLVTYLLALTGNLLIITIITVDRRLHSPMYYFLKHLSLLDLCFISVTVPQSIANSLMGNGYISLVQCILQVFFFIALASSEVAILTVMSYDRYAAICQPLHYETIMDPRACRHAVIAVWIAGGLSGLMHAAINFSIPLCGKRVIHQFFCDVPQMLKLACSYEFINEIALAAFTTSAAFICLISIVLSYIRIFSTVLRIPSAEGRTKVFSTCLPHLFVATFFLSAAGFEFLRLPSDSSSTVDLVFSVFYTVIPPTLNPVIYSLRNDSMKAALRKMLSKEELPQRKMCLKA

SEQ ID NO: 1617 - protein, 316 aa, Artificial Sequence
  Synthetic
MNVSFKTGFLLMGFSDERNLQILHSVLFLITYLLAIMGNLLIITIITLDQRLHSPMYYFLKHLSFLDLCFISVTVPQSIANSLMDNGFISLGQCMLQVFFFIALASSEVAILTVMSYDRYVAICRPLQYETIMDPHACKCAVIAVWMAGGLSGLLHTGVNFSIPLCGKRIIHQFFCDIPQMLKLACSYEFINEIAVAAFTTSTAFVCLIAIVFSYTQIFSTVMRIPSADSRTKVFSTCLPHLFVVMFFLSAAGFEFLRPPSDSLSAMDLIFSIFYTVIPPTLNPLIYSLRNEAMKAALRKVLSKEEFSRRMVYVKA

SEQ ID NO: 1618 - protein, 309 aa, Artificial Sequence
  Synthetic
MANSTLVPEFLLEVFAETWELRILLTVLFLLMYLGSLLGNLIIIIATTVDHILNTPMYFFLRNLSILDMGYVSVTVPNACINSLTDHRSISLAGCAGQIFLVFFSACVEIQFLTIMAQDRYVAICKPLLYAMIMNHQFCVQMTLASLLTSLILASVHTSKTFQLSFCHSNVVSQFFCDIPSLLRLSCTDTFINKLLLLLTAIVFSGSCFTFIAISYVRILSTVLKVPVKGERGKAFSTCVPHIIVVSVFLSSGAYVYLKPSAISEIVEDMTLSVFYTIVPPFLNPIIYSLRNKQIKKAVKKVIFRFFIV

SEQ ID NO: 1619 - protein, 309 aa, Artificial Sequence
  Synthetic
MANSTLVPEFFLEVFAETWELRILLTVLFLLMYLGSLLGNLIIIIATTVDQTLNTPMYFFLRNLSILDMGYVSVTVPNACINSLTDHRSISLAGCAGQIFLVFFSACVEIQFLTIMAQDRYVAICKPLLYAMIMNHQFCVQMTLASLLTSLILASVHTSKTFQLSFCHSNVVSQFFCDIPSLLRLSCTDTFINKLLLLLTAIVFSGSCFTFIAISYVRILSTVLKVPVKGERGKAFSTCVPHIIVVSVFLSSGAYVYLKPSAISEIVEDMTLSVFYTIVPPFLNPIIYSLRNKQIKKAVKKVIFRFFIV

SEQ ID NO: 1620 - protein, 308 aa, Artificial Sequence
  Synthetic
MMNSTMVTEFLLEVFAESWELRILLSVLFLLVYLGSLFGNLIIIIVTTVDQTLNTPMYFFLRNLSILDMGFVSVTVPNACINSLTDHRNISVAGCAAQIFLVFFCSCVEIQFLTTMAQDRYVAICKPLMYPVIMTHQFCVQMTLASLLTSLILASVHTSKTFQLSFCHSNIVPQFFCDIPSLLRLSCSDTFNNKLLLLLSAIGLSGSCFTFIAVSYVRILSTVLKVPVKGERGKAFSTCVPHIIVVSVFLSSGAYVYLKPPAIPEIIEDMTLSVFYTIVPPFLNPIIYSLRNKQIKEAVKKVIFRFLS

SEQ ID NO: 1621 - protein, 311 aa, Artificial Sequence
  Synthetic
MSNSTLVTEFMLEDFAENWELRILLSVLFLLVYLYSLIGNLIIIIATTVDQTLNTPMYFFLRNLSILDICYVSVTVPNACINSLTDHRNISVGGCAAQIFFVYICACVEILFLTIMAQDRYVAICKPLLYPVIMNHWFCVQMTLASLLSSLVLASVHTFKTFQLSFCHSNVVPQFFCDIPSLLRLSCSDTFNNKLLILLSAILVSGSCFVFIVISYVRILSTVLKVPVKGERGKAFSTCVPHIIVVSVFLSSAAYIYLKPPVVTLEVAKEMTLSVFYTIVPPFLNPIIYSLRNRQIKKAVSKLISRIFFLI

SEQ ID NO: 1622 - protein, 316 aa, Artificial Sequence
  Synthetic
NSTLVTEFLLEVFAESCELRILLSVLFLLVYLGSLFGNLIIIIVTTVDQTLNTPMYFFLRNLSIVDMCYVSVTVPNACFNSLTGQRNISVTGCAAQIFFVFFCACVEMFFLTIMAQDRYVAICKPLLYPVIMNHQFCVQMTLASLHSSLIIASVHTFKTFQLSFCHSNVVPQFFCDIPSLLKLSCSDTFNNKLLMLISAIIIGCSCFTFIAVSYFRILSTVLKVPVKGERGKAFSTCVPHIVVVSVFLSSSTYVYLRPPVPTLEVVKEMALSVSYTIVPPFLNPIIYSLRNRQIKEAVKKVILRISLVFEYKRNEY

SEQ ID NO: 1623 - protein, 316 aa, Artificial Sequence; identical to SEQ ID NO: 1622
  Synthetic

SEQ ID NO: 1624 - protein, 308 aa, Artificial Sequence
  Synthetic
NSTMVTEFLLEVFAETWELRVLLSVLFLLVYLGSLFGNLTIIIVTTVDQTLNTPMYFFLRNLSILDMCYVSITVPNACINSLTDHRNISVTGCAAQIFLFFFCACVEVQFLTIMAQDRYVAICKPLLYPMIMNHQFCVQMTLASLLTSLILSGMNTFKTFQLSFCHSNVVPQFFCELPALLRLTCSDTFNNKIILLLTAIGLSGTCFTFIAISYVHILSTVLKVPVKGERGKAFSTCVPHIIVAYLFLCSGAYAYLRPPAISEVVEDMTLSVFYTTVPPFLNPIIYSLRNKQIKKAVKKVIFRFFIVE

SEQ ID NO: 1625 - protein, 316 aa, Artificial Sequence
  Synthetic
NSTLVTEFFLEVFAEIWELRILITVLFLLVYLCSLLGNLTIIIVTTVDQTLNTPMYFFLRNLSILDMGYISITVPSTCINSLTNHRNMSVAGCAAQIFSFLFCACVEILVFSIMAQDRYVAICKPLLYPVIMNHQFCVQMTLASLLSSLVIASVHTFKTFQLSFCHSNVVPQFFCDLPALLRLSCSDTFSNKLLILLTVIGVSGSCFVFIAISYIHILSTVLKIPVKGERGKAFSTCVPHIIVVSVFVSSAAFVYLRPPVITFEVVQEMVISVFYTMVPPFLNPIVYSLRNKQIKEAVRKVILRVFPIFEYKRNIY

SEQ ID NO: 1626 - protein, 312 aa, Artificial Sequence [sequence omitted]

SEQ ID NO: 1627 - protein, 312 aa, Artificial Sequence
  Synthetic
MPNSTTVMEFLLMRFSDVWTLQILHSASFFMLYLVTLMGNILIVTVTTCDSSLHMPMYFFLRNLSILDACYISVTVPTSCVNSLLDSTTISKAGCVAQVFLVVFFVYVELLFLTIMAHDRYVAVCQPLHYPVIVNSRICIQMTLASLLSGLVYAGMHTGSTFQLPFCRSNVIHQFFCDIPSLLKLSCSDTFSNEVMIVVSALGVGGGCFIFIIRSYIHIFSTVLGFPRGADRTKAFSTCIPHILVVSVFLSSCSSVYLRPPAIPAATQDLILSGFYSIMPPLFNPIIYSLRNKQIKVAIKKIMKRIFYSENV

SEQ ID NO: 1628 - protein, 314 aa, Artificial Sequence
  Synthetic
MMSFAPNASHSPVFLLLGFSRANISYTLLFFLFLAIYLTTILGNVTLVLLISWDSRLHSPMYYLLRGLSVIDMGLSTVTLPQLLAHLVSHYPTIPAARCLAQFFFFYAFGVTDTLVIAVMALDRYVAICDPLHYALVMNHQRCACLLALSWVVSILHTMLRVGLVLPLCWTGDANLPHFFCDHRPLLRASCSDIHSNELAIFFEGGFLMLGPCALIVLSYVRIGAAILRLPSAAGRRRAVSTCGSHLTMVGFLYGTIICVYFQPPFQNSQYQDMVASVMYTAITPLANPFVYSLHNKDVKGALCRLLEWVKVDP

SEQ ID NO: 1629 - protein, 313 aa, Artificial Sequence
  Synthetic
MSCAPNASHSPIFLLLGFSRAGVPHTFLFLLFLFIYLTTILGNVTLVLLISWDSRLHSPMYYLLRGLSMIDLGLSTVTLPQLLVHLSSDSPAIPAARCLTQFFFFYAFGVTDTLVIAVMALDRYVAICDPLHYALVMNRQICARLLALSWVVSIVHTMLHVGLILPLCWAGDAKLPHFFCDHRPLLRASCSDTHSNELAIFLEGGFLMLGPCSLIVLSYARIGITILRLPSAAGRRRAVSTCGSHLTMVGFLYGTIIWVYFQPPSQNSRNQDMVASVMYTAITPLANPFVYSLRNKDVKGALHRLLRQGRVDS

SEQ ID NO: 1630 - protein, 313 aa, Artificial Sequence; identical to SEQ ID NO: 1629
  Synthetic

SEQ ID NO: 1631 - protein, 314 aa, Artificial Sequence
  Synthetic
MAVTNLTYKPQFQLLGLMDGTDPHPLLFLLFLSIYLLNALGNLSMVVLVRSDGALCSPMYYFLGHLSLVDVCFTTVTVPRLLATLLHPGQAISFQACFAQMYFFVALGITESYLLAAMSYDRAVAVCRPLHYGAVMTPWRCFLLVAASWAVAHLHSLLHTLLISALTYPPSAPVRHFFCDMTVMLSLATSDTSAAETAIFSEGLTVVLTPLLLVSLSYARILVAVLGIRTTGGRHRVFSTCGAHLVVVSLFFGSVLSVYFRPSSAYSARYDRMASVVYAVVTPTLNPFIYSLRNKEVKSALKRGFRWRAAPQDE

SEQ ID NO: 1632 - protein, 312 aa, Artificial Sequence
  Synthetic
MAPTNLTSAPVFLLLGLVDGTDAHPLLFLLCLGIYLLNALSNLSMVALVRSDGALRSPMYYFLGHLSLVDVCFTTVTVPRLLAGLLHPGQAISFQACFAEMYFFVALGITESYLLAAMSYDRPTAACRPLRYGALVTPWRCASLVRASWAVTHLHSLLHTLLLSALSYPYPTPVRPFFCDMTVMLSLATSDTSAAETAIFSEGLAVVLAPLLLVFLFLRAHPGRGARLAGGRRRAFSTCGAHLVAVALFFGSVLSVYFPPSSAYSARYDRLASVVYAVITPTLNPFINSLRNKEVKGALKRGLRWRAAPQEA

SEQ ID NO: 1633 - protein, 314 aa, Artificial Sequence
  Synthetic
MEATTCNGSVDGSTVFYLVGIPSLPPFYLPVFFLFLLFYLLILVGNALILVAVVAERSLHKPMYFFLINLSALDILFTTTTVPKMLSLLLLGDRFLSFPACLLQMYLFQSFTCSEAFILVVMAYDRYVAICRPLHYPVHMTPQTNTALAASAWITALLLPVPAVIKTSQMVYNDAYIYHCFCDHLALVQSSCSDTTPQTLMGFCIAMVVSFLPLLLVLLSYVRILTSVLQINSKEGRSKAFSTCSSHLLVVGTYYSSIAIAYVAYRADLPLDFHIMGNVVYSILTPILNPLIYTLRNKDVKAAITKIVYLKGMM

SEQ ID NO: 1634 - protein, 314 aa, Artificial Sequence
  Synthetic
MEATTCNGSVDGSTVFYLVGIPSLPPFYLPVFFLFLLFYLLILVGNALILVAVVAERSLHKPMYFFLINLSALDILFTTTTVPKMLSLLLLGDRFLSFPACLLQMYLFQSFTCSEAFILVVMAYDRYVAICRPLHYPVHMTPQTNTALAASAWITALLLPVPAVVKTSQMVYNDAYIYHCFCDHLALVQSSCSDTTPQTLMGFCIAMVVSFLPLLLVLLSYVRILTSVLRINSKEGRSKAFSTCSSHLLVVGTYYSSIAIAYVAYRANLPLDFHIMGNVVYSILTPILNPLIYTLRNKDVKVAITKIVYLKGMM

SEQ ID NO: 1635 - protein, 317 aa, Artificial Sequence
  Synthetic
NIACNGSGNSQTSFYLTGIPSLQSLFLPVFLIFLLLYLLILVGNALILVAVVTERSLHKPMYFFLINLSALDILFTTTTVPKMLSLLLLGDRFLSFPACFLQMYLFHSFSCSEAFILVVMAYDRYVAICRPLHYPVHMTPQTNTALAASAWITALLLPIPAVIQTSQMAFDNAYIYHCFCDHLAVVQASCSDTTPQTLMGFCIAMVVSFLPLLLVLLSYARILSSVLRINSKEGRSKAFSTCSSHLLVVGTYYSSIAIAYVAYRADLPLDFHIMGNVVYAILTPVLNPLIYTLRNKDVKSAITKMMCHQDPKSIGKP

SEQ ID NO: 1636 - protein, 318 aa, Artificial Sequence
  Synthetic
MDATACNESVDGSPVFYLLGIPSLPTFFLPVFFIFLLFYLLILMGNALILVAVVAEPSLHKPMYFFLINLSTLDILFTTTTVPKMLSLFLLGDRFLSFSSCLLQMYLFQSFTCSEAFILVVMAYDRYVAICHPLHYPVLMNPQTNATLAASAWLTALLLPIPAVVRTSQMAYNSAYIYHCFCDHLAVVQASCSDTTPQTLMGFCIAMVVSFLPLLLVLLSYVHILASVLRISSLEGRAKAFSTCSSHLLVVGTYYSSIAIAYVAYRADLPLDFHIMGNVVYAILTPILNPLIYTLRNRDVKAAITKIMSQDPGCDRSI

SEQ ID NO: 1637 - protein, 312 aa, Artificial Sequence
  Synthetic
MLGWSNGTNESYTSFLLMGFPGMQEARALLVLPFLSLYLVILFTNALVIHTVASQRSLHQPMYLLIALLLAVNICAATTVLPPMLFSFSTRFNRISLPRCLGQMFCIYFLVSMDCNILLVMALDRYVAICYPLRYPEIVTGQLLAGLVVLAVTRSTSIVAPVVVLASRVRFCRSDVIRHFACEHMALMKLSCGDISLNKTAGLIIRTFNRVLDMLLLGTSYSRIIHAAFRISSGGARSKALNTCGSHLLVIFTVYSSTMSVYRVARTASQDVHNLLSAFYLLLPCLVNPIIYGARTKEIRQHLVRSFLSAGP

SEQ ID NO: 1638 - protein, 312 aa, Artificial Sequence; identical to SEQ ID NO: 1637
  Synthetic

SEQ ID NO: 1639 - protein, 321 aa, Artificial Sequence
  Synthetic
MSGWSNGTNESYTSFLLMGFPGMQEARALLVLPFLSLYLVILFTNALVIHTVASQRSLHQPMYLLIALLLAVNICAATTVVPPMLFSFSTRFNRISLPRCLGQMFCIYFLIVFDCNILLVMALDRYVAICYPLRYPEIVTGQLLAGLVVLAVTRSTCIVAPVVVLASRVRFCRSDVIRHFACEHMALMKLSCGDISLNKTVGLTVRIFNRVLDMLLLGASYSRIIHAAFRISSGGARSKALNTCGSHLLVIFTVYSSTMSVYRVARTASQDVHNLLSAFYLLLPCLVNPIIYGARTKEIRQHLVALFQRTQQQVFTEKPQS

SEQ ID NO: 1640 - protein, 324 aa, Artificial Sequence
  Synthetic
MGEDGNTSNLSYSSFLLVGFPGLQEGRPLLVLPLTFLYVSIVSANALVIHTVVAQRSLHQPMYVLIALLLAVNICASTAVRPKMLEGFVHYANPISLRGCLTQMFFIYFTLLLDYNLLLAMALDRYVAICHPLRYTDLMTSHLLGLMATFAITRSLGVAVPLVVLTAKAQFCKTSVIRHFTCEYIALLSIACGDLTFNNRLGLAMRLVTVTFDLALLGTSYTRIIYAAFRISSGGARAKALHTCGSHLLVILTIYLSGLSTSIVFRVAKTVSQDVQNLLSAIYLLLPGALNPLIYGVRTKEIRQHIEKMLCGMQSPQDSREKSQ

SEQ ID NO: 1641 - protein, 311 aa, Artificial Sequence
  Synthetic
MGLNKSASTFQLTGFPGMEKAHHWIFIPLLAAYISILLGNGTLLFLIRNDHNLHEPMYYFLAMLAATDLGVTLTTMPTVLGVLWLDHREIGHGACFSQAYFIHTLSVMESGVLLAMAYDCFITIRSPLRYTSILTNTQVMKIGVRVLTRAGLSIMPIVVRLHWFPYCRSHVLSHAFCLHQDVIKLACADITFNRLYPVVVLFAMVLLDFLIIFFSYILILKTVMGIGSGGERAKALNTCVSHICCILVFYVTVVCTFIHRFGKHVPHVVHITMSYIHFLFPPFMNPFIYSIKTKQIQSGILRLFSLPHSRA

SEQ ID NO: 1642 - protein, 312 aa, Artificial Sequence
  Synthetic
MSSSGSSHPFLLTGFPGLEEAHHWISVFFLFMYISILFGNGTLLLLIKEDHNLHEPMYFFLAMLAATDLGLALTTMPTVLGVLWLDHREIGSAACFSQAYFIHSLSFLESGILLAMAYDRFIAICNPLRYTSVLTNTRVVKIGLGVLMRGFVSVVPPIRPLYFFLYCHSHVLSHAFCLHQDVIKLACADTTFNRLYPAVLVVFIFVLDYLIIFISYVLILKTVLSIASREERAKALITCVSHICCVLVFYVTVIGLSLIHRFGKQVPHIVHLIMSYAYFLFPPLMNPITYSVKTKQIQNAILHLFTTHRIGT

SEQ ID NO: 1643 - protein, 306 aa, Artificial Sequence
  Synthetic
MWSNISAAPFLLTGFPGLEAAHHWISIPFFAIYISVLLGNGTLLYLIKDDHNLHEPMYYFLAMLAGTDLTVTLTTMPTVMAVLWVNHREIRHGACFLQAYIIHSLSIVESGVLLAMSYDRFVAICTPLHYNSILTNSRVIAIGLGVVLRGFLSLVPPILPLFWFSYCRSHVLSHAFCLHQDVMKLACADITFNRIYPVVLVALTFFLDALIIVFSYVLILKTVMGIASGEERAKALNTCVSHISCVLVFYITVIGTFIHRFGKNAPHVVHITMSYVYFLFPPFMNPIIYSIKTKQIQRSVLHLLSV

SEQ ID NO: 1644 - protein, 306 aa, Artificial Sequence
  Synthetic
MWSNISAAPFLLTGFPGLEAAHHWISIPFFAIYISVLLGNGTLLYLIKDDHNLHEPMYYFLAMLAGTDLTVTLTTMPTVMAVLWVNHREIRHGACFLQAYIIHSLSIVESGVLLAMSYDRFVAICTPLHYNSILTNSRVIAIGLGVLLRGFLSLVPPILPLFWFSYCRSHVLSHAFCLHQDVMKLACADITFNRIYPVVLVALTFFLDALIIVFSYVLILKTVMGIASGEERKKSLNTCVSHISCVLVFYITVIGTFIHRFGKHAPHVVHITMSYVYFLFPPFMNPIIYSIKTKQIQRSVLRLLSV

SEQ ID NO: 1645 - protein, 310 aa, Artificial Sequence
  Synthetic
MWPNSSDAPFLLTGFLGLEMIHHWISIPFFVIYFSIILGNGTLLFIIWSDHSLHEPMYYFLAVLASMDLGMTLTTMPTVLGVLVLNQREIAQGACFIQSYFIHSLAIVESGVLLAMSYDRFVAICTPLHYNSILTNSRVMKMALGALLRGFVSIVPPIMPLFWFPYCHSHVLSHAFCLHQDVMKLACADITFNLIYPVVLVALTFFLDALIIIFSYVLILKTVMGIASGEERKKSLNTCVSHISCVLVFYITVIGTFIHRFGKHAPHVVHITMSYVYFLFPPFMNPIIYSIKTKQIQRSVLRLLSKHSRT

SEQ ID NO: 1646 - protein, 307 aa, Artificial Sequence
  Synthetic
MWYNNSAGPFLLTGFLGSEAVHYRISMSFFVIYFSVLFGNGTLLVLIWNDHSLHEPMYYFLAMLADTDLGMTFTTMPTVLGVLLLDQREIAHAACFTQSFIHSLAIVESGILLVLAYDCFIAIRTPLRYNCILTNSRVMNIGLGVLMRGFMSILPIILSLYCYPYCGSRALLHTFCLHQDVIKLACADITFNHIYPIIQTSLTVFLDALIIIFSYILILKTVMGIASGQEEAKSLNTCVSHISCVLVFHITVMGSFIHRFGKHAPHVVPITMSYFLFPPFVNPIIYSIKTKQIQRSIIRLFSGQSRA

SEQ ID NO: 1647 - protein, 308 aa, Artificial Sequence
  Synthetic
MWPNITAAPFLLTGFPGLEAAHHWISIPFFAVYVCILLGNGMLLYLIKHDHSLHEPMYYFLTMLAGTDLMVTLTTMPTVMGILWVNHREISSVGCFLQAYFIHSLSVVESGSLLAMAYDRFIAIRNPLRYASIFTNTRVIALGVGVFLRGFVSILPVILRLFSFSYCKSHVITRAFCLHQEIMRLACADITFNRLYPVILISLTIFLDSLIILFSYILILNTVIGIASGEERAKALNTCISHISCVLIFYVTVMGTFIYRFGKNVPEVVHIIMSYIYFLFPPLMNPVIYSIKTKQIQYGIIRLLSKHR

SEQ ID NO: 1648 - protein, 311 aa, Artificial Sequence
  Synthetic
MWPNITAAPFLLTGFPGLEAAHHWISIPFFAVYVCILLGNGMLLYLIKHDHSLHEPMYYFLTMLAGTDLMVTLTTMPTVMGILWVNHREISSVGCFLQAYFIHSLSVVESGSLLAMAYDCFIAIRNPLRYASILTNTRVIALGVGVFLRGFVSILPVILRLFSFSYCKSHVITRAFCLHQEIMRLACADITFNRLYPVILISLTIFLDCLIILFSYILILNTVIGIASGEERAKALNTCISHISCVLIFYVTVMGTFIYRFGKNVPEVVHIIMSYIYFLFPPLMNPVIYSIKTKQIQYGIIRLLSKHRFSS

SEQ ID NO: 1649 - protein, 316 aa, Artificial Sequence
  Synthetic
KVSIPPRANFSYAIFLLTGFPGLEWAHHWISLPIFMGYFVAIMGNATILHLVRTDPSLHQPMYYFLAILAVTDLGLCMSTLPSVLGVLWFDARMVGLVPCVLQQHFLHSFSFMESAVLFAMALDRLIAIRFPLRYASVLTGPRVALIGTVLGMRSAAITAAPSLHLLTFDYCHPGALSHAYCLHQDMIRLACSDTRFNRLYGLCIIMLAMGSDVLFILLSYAVILRTVLAIASAGERLKALNTCVSHILAVLCFYVPVLGLSIVHRFGQHTSPLVHILMGTVSVLFPPVMNPVIYSIKTQQIRRAIVKVISLGKIQ

SEQ ID NO: 1650 - protein, 316 aa, Artificial Sequence; identical to SEQ ID NO: 1649
  Synthetic

SEQ ID NO: 1651 - protein, 315 aa, Artificial Sequence
  Synthetic
MATTIVSSTFYLTGIPGYEEFHHWISIPFCFLYLVGITGNCMILHIVRTDPRLHEPMYYFLAMLSLTDMAMSLPTMMSLFRVLWSISREIQFNICVVQMFLIHTFSFTESSVLLAMALDRYVAICHPLRYATILTPKLIAKIGTAALLRSSILIIPLIARLAFFPFCGSHVLSHSYCLHQDMIRLACADIRFNVIYGLVLITLLWGMDSLGIFVSYVLILHSVLKIASREGRLKALNTCASHICAVLILYVPMIGLSIVHRFAKHSSPLIHIFMAHIYLLVPPVLNPIIYSVKTKQIREGILHLLCSPKISSITM

SEQ ID NO: 1652 - protein, 319 aa, Artificial Sequence
  Synthetic
MATSNSSTIVSSTFYLTGIPGYEEFHHWISIPFCFLYLVGITGNCMILHIVRTDPRLHEPMYYFLAMLSLTDMAMSLPTMMSLFRVLWSISREIQFNICVVQMFLIHTFSFTESSVLLAMALDRYVAICHPLRYATILTPKLIAKIGTAALLRSSILIIPLIARLAFFPFCGSHVLSHSYCLHQDMIRLACADIRFNVIYGLVLITLLWGMDSLGIFVSYVLILHSVLKIASREGRLKALNTCASHICAVLILYVPMIGLSIVHRFAKHSSPLIHIFMAHIYLLVPPVLNPIIYSVKTKQIREGILHLLCSPKISSITM

SEQ ID NO: 1653 - protein, 319 aa, Artificial Sequence
  Synthetic
MAPSNSSVSVSSTFYLTGIPGYEEFHHWISIPFCLIYIIGVTGNCSILHIVRTDPKLHEPMYYFLAMLSLTDMAMSLPAMVSLFRVLWSISREIQFNICVVQMFLIHTFSFTESSVLLAMALDRYVAICHPLRYATILTPKLIAKIGIAALLRSAIPLIPLLVRLAFFSFCRSHVLSHSYCLHQDIIRLACADIRFNVIYGMVVILMLWGMDSLGILITYVFILHSVLRIASREGRLKALNTCASHICAVLILYVPMIGLSIVHRFAKHSSPFVHIFMAHIYLMVPPVLNPIIYSVKTKQIRQGIFHLICPHKINSSAM

SEQ ID NO: 1654 - protein, 313 aa, Artificial Sequence
  Synthetic
MTALSVTNYTSSRFALTGFPGLEIYYFWISVPFFIIYVTVFLGNCMVLHVIRTELSLHQPMFYFLAMLALTDLCMGLSTVHTVMGILWGFLQEISLDACIAQSYFIHGLSFMESSVLLTMSFDRYIAICNPLRYSSILTNDRILKIGVAILCRSSMLIPPVIIRLKFLNYCRPHFLSHSFCLHQDLIRMACGDIRFNSIYGLALVISNLLVDSVLILISYIMILYTVLSIASREERIKSLQTCVSHISAVLVFYIPIIGLTMVHRFGKHLSPLVHVLMGNVYILFPPLMNPIIYSIKTQQIRVRIQRLFLKGT

SEQ ID NO: 1655 - protein, 313 aa, Artificial Sequence
  Synthetic
MTALSVTNYTSSRFALTGFPGLEIYYFWISVPFFIIYVTVFLGNCMVLHVIRTELSLHQPMFYFLAMLALTDLCMGLSTVHTVMGILWGFLQEISLDACIAQSYFIHGLSFMESSVLLAMSFDRYIAICNPLRYSSILTNDRILKIGVAILCRSSMLIPPVIIRLKFLNYCRPHFLSHSFCLHQDLIRMACGDIRFNSIYGLALVISNLLVDSVLILISYIMILYTVLSIASREERIKSLQTCVSHISAVLVFYIPIIGLTMVHRFGKHLSPLVHVLMGNVYILFPPLMNPIIYSIKTQQIRVRIQRLFLKGT

SEQ ID NO: 1656 - protein, 308 aa, Artificial Sequence
  Synthetic
MSNLSTSRFVLTGFPGLEVYYFFAIPFSTIYAMVFLGNCMILHVIRTESSLHQPMFYFLAMLALTDLCMGLSTVHTVLGILWGFLQEISLDACIAQSYFIHGLSFMESSVLLAMSFDRYIAICNPLRYSSILTNDRILKIGVAILCRSSMLIPPVIIRLKFLNYCRPHFLSHSFCLHQDLIRMACSDIRFNSFYALSLVICTLLLDAVLILASYVMILHTVLSIASREERIKSLQTCVSHISAVLVFYIPIIGLTMVHRFGKHLSPLVQVLMGNIYILFPPLMNPIIYSIKTQQIRVRIQRLFSLNGI

SEQ ID NO: 1657 - protein, 315 aa, Artificial Sequence
  Synthetic
MITSVSPSTSTNSSFLLTGFSGMEQQYPWLSIPFSSIYAMVLLGNCMVLHVIWTEPSLHQPMFYFLSMLALTDLCMGLSTVYTVLGILWGIIREISLDSCIAQSYFIHGLSFMESSVLLTMAFDRYIAICNPLRYSSILTNSRIIKIGLTIIGRSFFFITPPIICLKFFNYCHFHILSHSFCLHQDLLRLACSDIRFNSYYALMLVICILLLDAILILFSYILILKSVLAVASQEERHKLFQTCISHICAVLVFYIPIISLTMVHRFGKHLSPVAHVLIGNIYILFPPLMNPIIYSVKTQQIHTRMLRLFSLKRY

SEQ ID NO: 1658 - protein, 318 aa, Artificial Sequence
  Synthetic
PSSMSEVTNTTHGPFYFILTGIPGFEDIHLWISIPFFCLYTISIMGNTTILTVIRTEPSLHEPMYLFLSMLALTDLGLTLTTLPTVMQVLWFNIREISFEACFAQVFFLHGFSFMESSVLLAMSFDRYVAICRPLHYASILTSEVIARIGLAIICRCVLAVLPSLFLLKRLPFCHSHLLSHSYCLHQDMIHLVCADIRVNRWYGFALVLLIIVLDPLLIVLSYALILKSVLNTATWTERLRALNNCLSHMLAVLVLYVPMVGVSMTHRFAKHASPLVHVLMANIYLLAPPVMNPIIYSVKTKQIRQGITRLLLQRKVH

SEQ ID NO: 1659 - protein, 318 aa, Artificial Sequence; identical to SEQ ID NO: 1658
  Synthetic

SEQ ID NO: 1660 - protein, 318 aa, Artificial Sequence
  Synthetic
PSSMSEVTNTTHDPFYFILTGIPGFEDIHLWISIPLFCLYTISIMGNTTILTVIRTEPSLHQPMYLFLSMLALTDLGLTLTTLPTVMQLLWFNIREISFEACFAQFFFLHGFSFMESSVLLAMSFDRYVAICRPLHYASILTSEVIARIGLAIICRCVLAVLPSLFLLKRLPFCHSHLLSHSYCLHQDMIHLVCADIRVNSWYGFALVLLIIVLDPLLIVLSYALILKSVLNTATWTERLRALNNCLSHMLAVLVLYVPMVGVSMTHRFAKHASPLVHVLMANIYLLAPPVMNPIIYSVKTKQIRQGITRLLLQRKVH

SEQ ID NO: 1661 - protein, 317 aa, Artificial Sequence
  Synthetic
MSQVTNTTQEGIYFILTDIPGFEASHIWISIPVCCLYTISIMGNTTILTVIRTEPSVHQRMYLFLSMLALTDLGLTLTTLPTVMQLLWFNVRRISSEACFAQFFFLHGFSFMESSVLLAMSVDCYVAICCPLHYASILTNEVIGRTGLAIICCCVLAVLPSLFLLKRLPFCHSHLLSRSYCLHQDMIRLVCADIRLNSWYGFALALLIIIVDPLLIVISYTLILKNILGTATWAERLRALNNCLSHILAVLVLYIPMVGVSMTHRFAKHASPLVHVIMANIYLLAPPVMNPIIYSVKNKQIQWGMLNFLSLKNMHSR

SEQ ID NO: 1662 - protein, 318 aa, Artificial Sequence
  Synthetic
MSQVTNTTQEGIYFILTDIPGFEASHIWISIPVCCLYTISIMGNTTILTVIRTEPSVHQRMYLFLSMLALTDLGLTLTTLPTVMQLLWFNVRRISSEACFAQFFFLHGFSFMESSVLLAMSVDCYVAICCPLHYASILTNEVIGRTGLAIICCCVLAVLPSLFLLKRLPFCHSHLLSRSYCLHQDMIRLVCADIRLNSWYGFALALLIIIVDPLLIVISYTLILKNILGTATWAERLRALNNCLSHILAVLVLYIPMVGVSMTHRFAKHASPLVHVIMANIYLLAPPVMNPIIYSVKNKQIQWGMLNFLSLKNMHSRR

SEQ ID NO: 1663 - protein, 317 aa, Artificial Sequence
  Synthetic
MIPSGPFINISFFQPQSFLMIGIPGLEFAHGWISIPFSFMYTVALTGNCLILLAVRRTHSLHQPMYYFLSMLALSDVGLSLSTLPSTLAVLWFDYRSIDFNACLVQMFFLHSFSVVESSVLLAMSFDRFVAISNPLRYASVLTNNVIIRIGVAIVARATLSLFPVPFLLKRLNYCPGKILLHSFCFHADVMKLACADITVNILYGLYVVLSTVGVDSLLIVMSYSLILHTVMGLASPRERVRTLNTCVSHILAVLVFYIPVIGVSMIHRFGKHLPHIVHALVAYVYLVVPPVLNPIIYSVKSKPIRGAMFKVLRGKD

SEQ ID NO: 1664 - protein, 317 aa, Artificial Sequence; identical to SEQ ID NO: 1663
  Synthetic

SEQ ID NO: 1665 - protein, 317 aa, Artificial Sequence
  Synthetic
MISSKAFVNITFFQPQSFLMTGIPGLEFAHGWISIPFSSMYTVALTGNCLILLAVRRTHSLHQPMYYFLSMLALSDVGLSLSTLPSTLAVLWFDYRFIDFNACLIQMFFLHFFSVVESSVLLAMSFDRFVAISNPLRYASVLTNNVIIRIGVAITTRATLSLLPLPFLLKRLNYCPGKILLHSFCFHADVMKLACADITVNILYGLYVVLSTVGIDSLLIVMSYSLILHTVMGLASPRERVRTLNTCVSHILAVLVFYIPVIGVSMIHRFGKHLPHIVHALVAYVYLVVPPVLNPIIYSVKSKPIRGAMFRVLSRKG

SEQ ID NO: 1666 - protein, 301 aa, Artificial Sequence
  Synthetic
MTNLNASQANHRNFILTGIPGTPDKNPWLAFPLGFLYTLTLLGNGTILAVIKVEPSLHEPTYYFLSILALTDVSLSMSTLPSMLSIYWFNAPQIVFDACIMQMFFIHVFGIVESGVLVSMAFDRFVAIRNPLHYVSILTHDVIRKTGIAVLTRAVCVVFPVPFLIKCLPFCHSNVLSHSYCLHQNMMRLACASTRINSLYGLIVVIFTLGLDVLLTLLSYVLTLKTVLGIVSRGERLKTLSTCLSHMSTVLLFYVPFMGASMIHRFWEHLSPVVHMVMADIYLLLPPVLNPIVYSVKTKQI

SEQ ID NO: 1667 - protein, 301 aa, Artificial Sequence; identical to SEQ ID NO: 1666
  Synthetic

SEQ ID NO: 1668 - protein, 315 aa, Artificial Sequence
  Synthetic
MNSNASQTNHHSFILTGIPGMPDKNPWMAFPLGFLYTLTLLGNGTILAVVKVEQSLHEPMYYFLCILALTDVSLSMSTLPSMLSIFWFNAPEIPFDACITQMFFIHGFGVVESGVLVSMAFDRFVAIRDPLRYASILTHGLIGKIGLVVLARAVCVVFPVPFLIKRLPFCRSNVLSHSYCLHQDAMRLACASTRVNSLYGLIVVILTLGLDALIILFSYVLILKTVLGIASRAERLKALNTCLSHICAVLLFYIPLIGATMIHRFGKHLSPVVHMFMANIYLLLPPVLNPIVYSVKTKQIRRRIIQVFRGRKNMS

SEQ ID NO: 1669 - protein, 315 aa, Artificial Sequence
  Synthetic
MNSNASQTNHHSFILTGIPGMPDKNPWMAFPLGFLYTLTLLGNGTILAVGEVEQSLHEPMYYFLCILALTDVSLSMSTLPSMLSIFWFNAPEIPFDACITQMFFIHGFGVVESGVLVSMAFDRFVAIRDPLRYASILTHGLIGKIGLVVLARAVCVVFPVPFLIKRLPFCRPNILSHSYCLHQDAMRLACASTRVNSLYGLIVVILTLGLDALIILFSYVLILKTVLGIASRAERLKALNTCLSHICAVLLFYIPFIGATMIHRFGKHLSPVVHMFMANIYLLLPPVLNPIVYSVKTKQIRRRIIQVFRGRKNMS

SEQ ID NO: 1670 - protein, 296 aa, Artificial Sequence
  Synthetic
MINLNGSLTSHPVFILTGIPGMPDKSLWMVFPLGFLYTLTLLGNGTILAVGEVEQSLHEPMYYFLCMLALIDISLSMSTLPSMPPEIPFEACVAQMFFIHVFGLVDSVLLSIIAFDRFVAIQNPLHYASILTHGVIGKIGLVVLDRAVCVVFPVPFLIKRLPFCHPNILSHSYCLHQDMMRLACASTRVNSLYGLIIVILILGLDAFIILFSYILILKTVLGISSRAERLKALNTCLSHICTVLLFYIPFIGATMIHRFGKHLSPIVHMLMANIYLLLPPLLNPIVYSVKNKQIRG

SEQ ID NO: 1671 - protein, 318 aa, Artificial Sequence
  Synthetic
MADHNHSQSQHLYFILTGIPGLEQKYYWMAFPLGAIYVIALFGNGVIISTIKSESSLHIPMYYFLCMLAFADMGLTLCTLPSMLGIFWFNYKFITFDGCLVQMYFIHTFSAIESGVLVAMAIDRVIAIWSPLRYGTILTNGVVCKIGMLILSRAVCVVFPVPFLIKRLPFYRSNILSHSFCLHQDVMRLACASTRVNSLYGLIAVIFTKGSDSLSILISYVFILRTVMAIASGEGRLKALNTCVSHICAVLIFYVPLIGVSVIHRFGKHLSPLTHALMANAYLLVPPVLNPIVYTVKTKEIRKKIIQIFIRTKITTEG

SEQ ID NO: 1672 - protein, 315 aa, Artificial Sequence
  Synthetic
MGDWNNSDAVEPIFILRGFPGLEYVHSWLSILFCLAYLVAFMGNVTILSVIWIESSLHQPMYYFISILAVNDLGMSLSTLPTMLAVLWLDAPEIQASACYAQLFFIHTFTFLESSVLLAMAFDRFVAICHPLHYPTILTNSVIGKIGLACLLRSLGVVLPTPLLLRHYHYCHGNALSHAFCLHQDVLRLSCTDARTNSIYGLCVVIATLGVDSIFILLSYVLILNTVLDIASREEQLKALNTCVSHICVVLIFFVPVIGVSMVHRFGKHLSPIVHILMADIYLLLPPVLNPIVYSVRTKQIRLGILHKFVLRRRF

SEQ ID NO: 1673 - protein, 315 aa, Artificial Sequence; identical to SEQ ID NO: 1672
  Synthetic

SEQ ID NO: 1674 - protein, 313 aa, Artificial Sequence
  Synthetic
MSVINDSSLYPRFLLTGFPGLETRYGLISIPIFLVYVTSIAGNITILFIIRTESSLHQPMYYFLSMLALTDLGLSTTTLPTMFSVFWFQAREIPFNACLVQMYFIHVFSIIESAVLLAMAFDRFVAIREPLRYAAILTNTVIVGIGLAIAGRALALVFPASFLLKRLQYRVINILSYPFCLHQDLIKTTVSSRWVSSIYGLMVVIFSMGLDSLLLLLSYILILGTVLSIASKAERIKALNTCISHICAVLTFYTPMIGLSMIRRYGQNASPIVHVIMANVYLLVPPLMNPIVYSVKTKQIRDRILRKLKKQKV

SEQ ID NO: 1675 - protein, 313 aa, Artificial Sequence; identical to SEQ ID NO: 1674
  Synthetic

SEQ ID NO: 1676 - protein, 321 aa, Artificial Sequence
  Synthetic
MTILLNSSLQRATFFLTGFQGLEGLHGWISIPFCFIYLTVILGNLTILHVICTDATLHGPMYYFLGMLAVTDLGLCLSTLPTVLGIFWFDTREIGIPACFTQLFFIHTLSSMESSVLLSMSIDRYVAVCNPLHDSTVLTPACIVKMGLSSVLRSALLILPLPFLLKRFQYCHSHVLAHAYCLHLEIMKLACSSIIVNHIYGLFVVACTVGVDSLLIFLSYALILRTVLSIASHQERLRALNTCVSHICAVLLFYIPMIGLSLVHRFGEHLPRVVHLFMSYVYLLVPPLMNPIIYSIKTKQIRQRIIKKFQFIKSLRCFWKD

SEQ ID NO: 1677 - protein, 321 aa, Artificial Sequence; identical to SEQ ID NO: 1676
  Synthetic

SEQ ID NO: 1678 - protein, 321 aa, Artificial Sequence
  Synthetic
MTILLNSSLQRATFFLTGFQGLEGLHGWISIPFCFIYLTVILGNLTILHVICTDATLHGPMYYFLGMLAVTDLGLCLSTLPTVLGIFWFDTREIGIPACFTQLFFIHTLSSMESSVLLSMSIDRSVAVCNPLHDSTVLTPACIVKMGLSSVLRSALLILPLPFLLKRFQYCHSHVLAHAYCLHLEIMKLACSSIIVNHIYGLFVVACTVGVDSLLIFLSYALILRTVLSIASHQERLRALNTCVSHICAVLLFYIPMIGLSLVHRFGEHLPRVVHLFMSYVYLLVPPLMNPIIYSIKTKQIRQRIIKKFQFIKSLRCFWKD

SEQ ID NO: 1679 - protein, 313 aa, Artificial Sequence
  Synthetic
MAILYNSSLQKATFFLTGFQGLEEFHGWISIPFCSIYLIVILGNLTILHVIRTDATLHEPMYYFLAMLALTDLGLCLSTLPTVLGIFWFDAREIGIPACFTQLFFIHTLSLVESSVLLSMSFDRYVAICNPLRYSTILTPRRIVKMGLSSVLRSALLILPLPFLLKRFHYCRSHVLAHAYCLHLEIMKLACSSIIVNHIYGLFVVACTVGVDSLLIFLSYTLILHAVLGKASRQERLRALNTCISHICAVLLFYIPMIGLSLVHRFGEHLPRIVHLLMSYVYLLVPPLMNPIVYSIKTKQIRQRIIKKFEFIK

SEQ ID NO: 1680 - protein, 313 aa, Artificial Sequence; identical to SEQ ID NO: 1679
  Synthetic

SEQ ID NO: 1681 - protein, 314 aa, Artificial Sequence
  Synthetic
MTLGSLGNSSSSVSATFLLSGIPGLERMHIWISIPLCFMYLVSIPGNCTILFIIKTERSLHEPMYLFLSMLALIDLGLSLCTLPTVLGIFWVGAREISHDACFAQLFFIHCFSFLESSVLLSMAFDRFVAICHPLHYVSILTNTVIGRIGLVSLGRSVALIFPLPFMLKRFPYCGSPVLSHSYCLHQEVMKLACADMKANSIYGMFVIVSTVGIDSLLILFSYALILRTVLSIASRAERFKALNTCVSHICAVLLFYTPMIGLSVIHRFGKQAPHLVQVVMGFMYLLFPPVMNPIVYSVKTKQIRDRVTHAFCY

SEQ ID NO: 1682 - protein, 314 aa, Artificial Sequence [sequence omitted]

SEQ ID NO: 1683 - protein, 312 aa, Artificial Sequence
  Synthetic
MTPGPLGNGSMSSTFLLSGIPGLEHMHIWISLPLCLMYLVSILGNCTILFIIKTEPSLHEPMYLFLSMLALTDLGLSLCTLPTVLGIFWVGARDISHDACFTQLFFIHCLSFLESSVLLSMAFDRFVAICRPLHYASILTHTVIVRIGLASLGRSVALIFPLPFMLKRFPYCGSLVLSHSYCLHQEVMKLACADIKANSIYGMFVIVSTVGVDSLLILFSYALILRTVLSIASRAERLKALNTCVSHISAVLLFYTPMIGLSVIHRFGKQAPHLVQVVMGFVYLLFPPVMNPIVYSVKTKQIRDRVAHAFCN

SEQ ID NO: 1684 - protein, 313 aa, Artificial Sequence
  Synthetic
KSSIMSVLNSSEIEITTFFLIGIPGLEYAHAWISIPICLMYLVAILGNCTILFVIRTEPSLHAPMYYFLSMLAISDLGLSLSSLPTMLRIFVFNATGISPNACFAQEFFIHGFTDMESSVLLIMSFDRFLAIRNPLRYSSILTSARVAKMGLVFLIKSMLLVLPFPFTLKRLAYCQKSLLSHSYCLHQDVMKLACSDNTVNFFYGFFVALCMMSDSMFIAVSYIFILKTVMGIGSHKERLKALNTCVSHICAVLIFYVPIIAASMHRFGKHKSPMAMILIADIFLLVPPLMNPIVYCVKTRQIREKVGKLGLK

SEQ ID NO: 1685 - protein, 314 aa, Artificial Sequence
  Synthetic
KSSIMSVLNSSEIEITTFFLIGIPGLEYAHAWISIPICLMYLVAILGNCTILFVIRTEPSLHAPMYYFLSMLAISDLGLSLSSLPTMLRIFVFNATGISPNACFAQEFFIHGFTDMESSVLLIMSFDRFLAIRNPLRYSSILTSARVAKMGLVFLIKSMLLVLPFPFTLKRLAYCQKSLLSHSYCLHQDVMKLACSDNTVNFFYGFFVALCMMSDSMFIAVSYIFILKTVMGIGSHKERLKALNTCVSHICAVLIFYVPIIAASMHRFGKHKSPMAMILIADIFLLVPPLMNPIVYCVKTRQIREKVLGKLGLK

SEQ ID NO: 1686 - protein, 309 aa, Artificial Sequence
  Synthetic
NTSEVEISSFLLIGIPGFEHMHIWISIPICLMYLTAILGNCTILCVIRTEPSLHEPMYYFLSMLAFSDLGLSFSSIPTMLRIFLFNAMGISTDACIAQEFFIHGFTDMESSVLLIMSFDRFVAIRHPLRYSAILTSSRVVQIGLAFSVKSILLVLPLPFTLKRLRYCNKRLLSHSYCLHQDVMKLACSDNRVNFYYGLFVALCMMSDSVFIAVSYVFILKTVLGIASHGERLKALNTCVSHICAVLIFYVPIITLATMHRFAKHKSPLAMILIADAFLLVPPLMNPIVYCVKTRQIRVKVLEKLGLHSK

SEQ ID NO: 1687 - protein, 312 aa, Artificial Sequence
  Synthetic
MSVLNNSEVKLFLLIGIPGLEHAHIWFSIPICLMYLLAIMGNCTILFIIKTEPSLHEPMYYFLAMLAVSDMGLSLSSLPTMLRVFLFNAMGISPNACFAQEFFIHGFTVMESSVLLIMSLDRFLAIHNPLRYSSILTSNRVAKMGLILAIRSILLVIPFPFTLRRLKYCQKNLLSHSYCLHQDTMKLACSDNKTNVIYGFFIALCTMLDLALIVLSYVLILKTILSIASLAERLKALNTCVSHICAVLTFYVPIITLAAMHHFAKHKSPLVVILIADMFLLVPPLMNPIVYCVKTRQIWEKILGKLLNVCGR

SEQ ID NO: 1688 - protein, 312 aa, Artificial Sequence
  Synthetic
MSVFNNSEVMYFLLIGIPGLEYAHEWISIPIFLMYLIAIMGNCIIIFVIKTEPSLHEPMYYFLTMLAVSDMGLSFSSLPTMLKIFFFNAMAISPNACFAQEFFIHGFTVMESSVLLIMSLDRFLAIHNPLRYSSILNGRRVAKIGLILAFRSTVLVLPFPFTLRKLKYCHKNLLSHSYCLHQDVMKLACSDNKINFIYGFFVALCTMLDFALILMSYVLILKTVLSIASLAERLKALNTCVSHICAVLIFYVPIITLAAIHRFAKHKSPLLVILIADMFLLVPPLMNPIVYCIKTRQIREKVLGKLVNLCVR

SEQ ID NO: 1689 - protein, 313 aa, Artificial Sequence
  Synthetic
MSIINTSYVEITTFFLVGMPGLEYAHIWISIPICSMYLIAILGNGTILFIIKTEPSLHGPMYYFLSMLAMSDLGLSLSSLPTVLSIFLFNAPETSSSACFAQEFFIHGFSVLESSVLLIMSFDRFLAIHNPLRYTSILTTVRVAQIGIVFSFKSMLLVLPFPFTLRSLRYCKKNQLSHSYCLHQDVMKLACSDNRIDVIYGFFGALCLMVDFILIAVSYTLILKTVPGIASKKEELKALNTCVSHICAVIIFYLPIINLAVVHRFAGHVSPLINVLMANVLLLVPPLMKPIVYCVKTKQIRVRVVAKLCQWKI

SEQ ID NO: 1690 - protein, 313 aa, Artificial Sequence
  Synthetic
MSIINTSYVEITTFFLVGMPGLEYAHIWISIPICSMYLIAILGNGTILFIIKTEPSLHEPMYYFLSMLAMSDLGLSLSSLPTVLSIFLFNAPEISSNACFAQEFFIHGFSVLESSVLLIMSFDRFLAIHNPLRYTSILTTVRVAQIGIVFSFKSMLLVLPFPFTLRNLRYCKKNQLSHSYCLHQDVMKLACSDNRIDVIYGFFGALCLMVDFILIAVSYTLILKTVLGIASKKEQLKALNTCVSHICAVIIFYLPIINLAVVHRFARHVSPLINVLMANVLLLVPPLTNPIVYCVKTKQIRVRVVAKLCQRKI

SEQ ID NO: 1691 - protein, 313 aa, Artificial Sequence [sequence omitted]

SEQ ID NO: 1692 - protein, 319 aa, Artificial Sequence
  Synthetic
MSYSNHSSTSFFLTGLPGLETVYLWLSIPLCTMYIASLAGNGLILWVVKSEPSLHQPMYYFLSMLAVTDLGLSVSTLPTMLTIYMMGVSEVALDMCLAQLFFIHTFSIMESSVLLTMAFDRVVAISSPLHYATILTNPRVASLGMVILVRSIGLHIPAPIMLKKLPYCQKRHLSHSYCLHPDVMKLACTDTRINSAYGLFVVLSTLGVDSVLIVLSYGLILYTVLSIASKTERLKALNTCVSHICSVLLFYTPMIGLSMIHRFGKWASPCSRVLLSYLHFLTPPVLNPVVYTIKTKQIRQRIWCIFRCGGRSIGHIQGH

SEQ ID NO: 1693 - protein, 319 aa, Artificial Sequence
  Synthetic
MSYSNHSSTSFFLTGLPGLETVYLWLSIPLCTMYIASLAGNGLILWVVKSEPSLHQPMYYFLSMLAVTDLGLSVSTLPTMLTIYMMGVSEVALDMCLAQLFFIHTFSIMESSVLLTMAFDRVVAISSPLHYATILTNPRVASLGMVILVRSIGLHIPAPIMLKKLPYCQKRHLSHSYCLHPDVMKLACTDTRINSAYGLFVVLSTLGVDSVLIVLSYGLILYTVLSIASKTERLKALNTCVSHICSVLLFYTPMIGLSMIHRFGKWASPCSRVLLSYLHFLTPPVLNPVVYTIKTKQIRQRIWRIFRCGGRSIGHIQGH

SEQ ID NO: 1694 - protein, 314 aa, Artificial Sequence
  Synthetic
MAISKHSNASSFFFILMDLPGLETSHCWTAIPICLIYVLSVLGNITIMHIVKSVPSLHTPMYLFLSMLSMADLGLSASTLPSMVAVFLLGQRMIGAVACFMQLFFIHTFSVIESAVLLAMAFDRCVAIREPLRYATILTTRRIGAIGLAVVIRSAALHLPLPVLLGRLTFQPVSALSHSYCVHPDVLRLSCSSTLVNSGFGLFVMLSTLGMDAVLILLSYVLILKTVLSIASNAERLKAFNTCISHICAVLLFYTPLVSLSMIHRFGKKLPAQVYMFLSYLHFLMPPMLNPIVYSVKTKEIRVRILKMLHPKKH

SEQ ID NO: 1695 - protein, 312 aa, Artificial Sequence
  Synthetic
MGLFNVTHPAFFLLTGIPGLESSHSWLSGPLCVMYAVALGGNTVILQAVRVEPSLHEPMYYFLSMLSFSDVAISMATLPTVLRTFCLNARNITFDACLIQMFLIHFFSMMESGILLAMSFDRYVAICDPLRYATVLTTEVIAAMGLGAAARSFITLFPLPFLIKRLPICRSNVLSHSYCLHPDMMRLACADISINSIYGLFVLVSTFGMDLFFIFLSYVLILRSVMATASREERLKALNTCVSHILAVLAFYVPMIGVSTVHRFGKHVPCYIHVLMSNVYLFVPPVLNPLIYSAKTKEIRRAIFRMFHHIKI

SEQ ID NO: 1696 - protein, 312 aa, Artificial Sequence; identical to SEQ ID NO: 1695
  Synthetic

SEQ ID NO: 1697 - protein, 312 aa, Artificial Sequence
  Synthetic
MALFNVTHPASFLLTGIPGLESLHPWLAGPLCVMYAVALGANTVILQAVRVEPILHAPMYYFLSMLSFSDVAMSMATLPTVLRTFCFDARSIAFDACLVQMFLIHSFSMMESGILLAMSFDRYVAICNPLHYATVLTNEFIAGMGLAVTARSFITLFPLPFLIKRLPICKSNVLSHSYCLHPDMMKLACADITINSIYGLFVLVSTFGMDLLFIFLSYVLILRSVMAIASHEERLKALNTCVSHILAVLAFYVPMIGVSTVHRFGKHAPRYIHVLMSNVYLFVPPVLNPLIYSAKTKEIRRAIFRMFRRIKL

SEQ ID NO: 1698 - protein, 314 aa, Artificial Sequence
  Synthetic
MLGLNGTPFQPATLQLTGIPGIQTGLTWVALIFCILYMISIVGNLSILTLVFWEPALHQPMYYFLSMLALNDLGVSFSTLPTVISTFCFNYNHVAFNACLVQMFFIHTFSFMESGILLAMSLDRFVAICYPLRYVTVLTHNRILAMGLGILTKSFTTLFPFPFVVKRLPFCKGNVLHHSYCLHPDLMKVACGDIHVNNIYGLLVIIFTYGMDSTFILLSYALILRAMLVIISQEQRLKALNTCMSHICAVLAFYVPIIAVSMIHRFWKSAPPVVHVMMSNVYLFVPPMLNPIIYSVKTKEIRKGILKFFHKSQA

SEQ ID NO: 1699 - protein, 314 aa, Artificial Sequence [sequence omitted]

SEQ ID NO: 1700 - protein, 313 aa, Artificial Sequence
  Synthetic
MLGLNGTPFQPATLQLTGIPGMNTGQAWIALIFCFLYFISIAGNLSILALVIREPPLHQPMYYFLSMLSLNDLGVSLSTLPTVLATFCFNYRHVDFDACLVQMFFIHTFSFMESGILLAMSFDRFVAICDPLRYSTVLTNSRILAMGLGILAKSFTTLFPFPFLVKRLPFCKGNVLHHSYCLHPDLMKVACGDIHVNNIYGLFVVIFTYGVDSVFILLSYALILRAVLVIASHEQRLKALNTCISHICAVLAFYVPIIAVSMIHRFKSAPAVVHVMMSNVYLFVPPMLNPIIYSVKTKEIRKGMLKVFHKSQT

SEQ ID NO: 1701 - protein, 314 aa, Artificial Sequence
  Synthetic
MGGEAHNSSGLPPFILTGLPGMETSQHWLFLLLGVLYSVSIVGNALILFIIKEEESLHQPMYYFLSLLSGNDLGVSFSTLPTVLGVFCFHLREISFNSCMSQMFFIHLFSFMESGILLAMSFDRYVAICNPLRYSTVLTDARVMWMGVCVFLRSFCMIFPLPFLLKRLPFCKANVLSHAYCLHPDLIRLPCGDTSINNIFGLSIVISTFGLDSALIFLSYVLILRSVLAIASREERMKTLNTCVSHLCAVLIFYVPKVGVSMFARYGRHAPHYVHTLLSLIYLFVPPMLNPVIYSIKTKEIRRRFCKILLGNKF

SEQ ID NO: 1702 - protein, 314 aa, Artificial Sequence; identical to SEQ ID NO: 1701
  Synthetic

SEQ ID NO: 1703 - protein, 314 aa, Artificial Sequence
  Synthetic
MGGEAHNSSGLPPFILTGLPGMETSQHWLFLLLGVLYTVSIVGNALILFIIKEEESLHQPMYYFLSLLSLNDLGVSFSTLTTVLGVFCFLLREISFNSCMSQMFFIHLFSFMESGILLAMSFDRYVAICNPLHYSTVLTDARVMWMGVCVFFRSFCMIFPLPFLLKRLPFCKANVLSHAYCLHPDMIRLPCGDITINNIFGLFIVISTFGLDSALILLSYVLILRSVLAIASREERLKTLNTCVSHLCAVLIFYVPMVGVSMAARYGRHAPRYVHTLLSLVYLFVPPMLNPVIYSIKTKEIRRRLHKILLGTKI

SEQ ID NO: 1704 - protein, 314 aa, Artificial Sequence
  Synthetic
MRTLYSNTSSTLSFMLTGFPEMQSLEHWLAALLLLLYVISIVGNALILFIIKEEQSLHHPMYYFLSLLSVNDLGVSFSTLPTVLASMCFHIPETAFDACLAQMFFIHFFSWTESGILLAMSFDRYVAICNPLHYSSVLTDARVAHMGMSIIIRSFCMVFPLPFLLKRLPFCKANVLTHSYCLHPDLIRLPCGDTTINSMYGLFIVISAFGVDSVLILLSYVLILRSVLAIASREERLKTLNTCVSHISAVLIFYVPMISVSMVHRFVKHAPEYVHKFTSLVYLFVPPMLNPIIYSIKTKEIRRRLHKMLLGTKF

SEQ ID NO: 1705 - protein, 314 aa, Artificial Sequence
  Synthetic
MGNFRINASQVPSFILTGFPGMEAMEPWLSLPFLLFYAISIIGNSLILLIIKEEQSLHQPMYYFLSLLSVNDLGVSFSTLPTVLTTLCFHARVINFNACLAQMFFIHLFSWTESGILLAMSFDHYVAICNPLRYATVLTNARIVAMGLGTVLRSFVLIVVFPVLLHRLPFCHPNILSHAYCLHVDMIKLACTDVSLNSHYGLSIVLLTFGLDSALILISYVLILRSVLAIASREERLKTLNTCVSHILAVLIFYVPMVSVSIVHRFGAGLPHAVHILMSILYLFVPPMLNPIIYSIKTKEIRRRLLKMLFRVKL

SEQ ID NO: 1706 - protein, 323 aa, Artificial Sequence
  Synthetic
MKNYNSSGFLPTTFILVGIPGLETEHIWISIPFCLMYFIIFLGNGTILHVIRTDASLHQPMYLFLAMLALAEVGVSASTLPTVLGIFLFDTSEITFEACLLQMFFIHSFSIMESAVLLAMSVDRFVAIYSPLRYTTILTLPRIFGTGAVIGLKSVILMAPLPILLRRLPFCGHNALSHSYCLHPNLIHLPCGDISIDNIYGLFIVTSTFGLDSLLIVVSYGLILHTVLGIATGDGRRKALNTCGSHVCAVLAYYVPMIGLSMVHRFAHHVSPLLQTMMANAYLFFPPSHQPHCLQHQSNAVREEVQSLVEDVKIGGCLVGFYH

SEQ ID NO: 1707 - protein, 316 aa, Artificial Sequence
  Synthetic
MGAENNESLDLLSIFLTGIPGLEAQHGWLSIPFFIMYIVAIVGNSLIMIAVQQESALHEPMYLFLSMLAITEVGVSVSTLPTVMGILWFNAYRIDFDGCLAQMFFIHTFSGMESGVLLAMSYDRFVAIYNPLRYTAILTLPRIISMGLGITLKSVALMAPLPILLKQLPYCHINILSHSYCLHSDLIQLPCADTRLNSILGLAIVLATFGLDSLLIVVSYGLILYTVMGIASGEGRKKTLNTCVSHICAVLIYYVPMIGVSVMHRVAKHASPVVHTLMSSIYLFVPPVLNPIIYSVKTRPIQQGIANLFSCKKGSI

SEQ ID NO: 1708 - protein, 316 aa, Artificial Sequence; identical to SEQ ID NO: 1707
  Synthetic

SEQ ID NO: 1709 - protein, 326 aa, Artificial Sequence
  Synthetic
MTETSLSNNTIAEPLIFLLMGIPGLKATQYWISIPFCLLYVVAVSGNSMILFVVLCERSLHKPMYYFLSMLSATDLSLSLCTLSTTLGVFWFEAREINLNACIAQMFFLHGFTFMESGVLLAMAFDRFVAICYPLRYTTILTNARIAKIGMSMLIRNVAVMLPVMLFVKRLSFCSSMVLSHSYCYHVDLIQLSCTDNRINSILGLFALLSTTGFDCPCILLSYILIIRSVLSIASSEERRKAFNTCTSHISAVSIFYLPLISLSLVHRYGHSAPPFVHIIMANVFLLIPPVLNPIIYSVKIKQIQKAIIKVLIQKHSKSNHQLFLI

SEQ ID NO: 1710 - protein, 323 aa, Artificial Sequence
  Synthetic
MSVLNNTIAEPLIFLLMGIPGLKATQYWISIPFCLLYVVAVSGNSMILFVVLCERSLHKPMYYFLSMLSATDLSLSLCTLSTTLGVFWFEAREINLNACIAQMFFLHGFTFMESGVLLAMAFDRFVAICYPLRYTTILTNARIAKIGMSMLIRNVAVMLPVMLFVKRLSFCSSMVLSHSYCYHVDLIQLSCTDNRINSILGLFALLSTTGFDCPCILLSYILIIRSVLSIASSEERRKAFNTCTSHISAVSIFYLPLISLSLVHRYGHSAPPFVHIIMANVFLLIPPVLNPIIYSVKIKQIQKAIIKVLIQKHSKSNHQLFLI

SEQ ID NO: 1711 - protein, 313 aa, Artificial Sequence
  Synthetic
MLILNNTHSQLPTFLLTGIPGLRAAQVWISIPFCLLYLSGNSMILLVIVREQSLHEPMYYFLSMLSITDLSLSLCTLSTTLGVLWFEAREINLNACIAQMFFLHGFTFMESGVLLAMAFDRFVAICDPLRYTTILTNARIAQIGTIVLIRNVAVMLPVVLFVKRLSFCSSLVLSHSYCYHVDVIQLSCTDNRINSVLGLFALFSTTGFDCPCILLSYVLIIRSVLSIASSDERQKAFNTCISHISAVAIFYIPLISLSLVHRYGHSAPAFVHTVMANVFLLIPPVLNPIIYSVKTKQIRKAILKVLNQKQNQL

SEQ ID NO: 1712 - protein, 314 aa, Artificial Sequence
  Synthetic
QDNTEFLSNFTSKLSTFLLTGIPGLESAHGWISIPFCCLYATALSGNSMILFIIVTQHSLHEPMYYFLSVLSATDLGLTFSTMSTTLRILWFQANEISLDLCIVQMFFLHGFTCTESGVLVAMAFDRYVAICKPLRYTMILTNSRIIQIGFLVIMRTLLLIIPLLLLLKPVSFCKRNTLSHSYCYPDVIKLACSDTRANNICGLVDLILTTGLDIPCIVLSYILIIRSVLNIASSEERHKAFSTCVSHIAAVAVFYIPMFSLSLVHRYGRSVPKVVHTMMANVYLLLPPVLNPIIYSVKTKQIRKAILSLLFAK

SEQ ID NO: 1713 - protein, 315 aa, Artificial Sequence
  Synthetic
QDNTEFLSNFTSKLPTFLLTGIPGLESAHGWISIPFCCLYATALSGNSMILFIIVTQHSLHEPMYYFLSVLSATDLGLTFSTMSTTLRILWFQANEISLDFCIVQMFFLHGFTCTESGVLVAMAFDRYVAIYKPLRYTMILMNSRIIQIGFLVIMHTLLLTVPLLLLLKPVSFCKRNTLSHSYCYHPDVIKLACSDTRANSICGLVDLILTTGVDIPCIVLSYILIIRSVLNIAFSEERHKAFSTCVSHIAAVAVFYIPTFSLSLVHRYGRSVPKVVHTMMANVYLLLPPVLNPIIYSVKTKQIRKAILSLLFAK

SEQ ID NO: 1714 - protein, 315 aa, Artificial Sequence
  Synthetic
QDNTEFLSNFTSQLPTFLLTGIPGLESAHSWISIPFCCLYATALSGNSMILFIIVTQHSLHEPMYYFLSVLSATDLGLTFSTMSTTLRILWFQANEISLDFCIVQMFFLHGFTFIESGVLVAMAFDRYVAICNPLRYTMILTNSRIIQMGFLVIMRALLLIVPLLLLLKPVSFCKRNTLSHSYCYHPDVIKLACSDTRANSICGLVDLILTTGIDTPCIVLSYILIIRSVLSIASSEERHKTFSTCVSHIGAVAVFYIPMFSLSLVHRYGRSAPKVVHTMMANVYLLLPPVLNPIIYSVKTKQIRKAILSLLFAK

SEQ ID NO: 1715 - protein, 312 aa, Artificial Sequence
  Synthetic
MEILSNSTSKFPTFLLTGIPGLESAHVWISIPFCCFYAIALSGNSVILFVIITQQSLHEPMYYFLFRLSATDLGLTVSSLSTTLGILWFEAREISLYSCIVQMFFLHGFTFMESGVLVATAFDRYVAICDPLRYTTILTNSRIIQMGLLMITRAIVLILPLLLLLKPLYFCRMNALSHSYCYHPDVIQLACSDIRANSICGLIDLILTTGIDTPCIVLSYILIIHSVLRIASPEEWHKVFSTCVSHVGAVAFFYIHMLSLSLVYRYGRSAPRVVHSVMANVYLLLPPVLNPIIDSVKTKQIRKAMLSLLLTK

SEQ ID NO: 1716 - protein, 313 aa, Artificial Sequence
  Synthetic
MPTFQNTTASSIIFLLTGVPGLEAFHTWISIPFCFLYATALSGNSLILFVIITQPSLHEPMYYFLSMLSTTDLGLSISTLATMLGIFWFNAREISFNACLSLMFFIKLFTVMESSVLLAMAYDRYVAISNPLRYATILTDSRIAQIGVTIVIRGTVMLTPMVALLKRLTFCSSRVLHHSYCFHPDVMKLSCTDTRINNAVGLTAMISTVGVDSVLILLSYILIIRTVLSIASPEERKKAFSTCISHIGAVAIFYIPLISSFVHRFGKRAPPYVHTMIANTYLLIPPVMNPIIYSVKTKQIRKAVIKVFQSKEI

SEQ ID NO: 1717 - protein, 313 aa, Artificial Sequence
  Synthetic
MPTFQNTTASSIIFLLTGVPGLEAFHTWISIPFCFLYATALSGNSLILFVIITQPSLHEPMYYFLSMLSTTDLGLSISTLATMLGIFWFNAREISFNACLSQMFFIKLFTVMESSVLLAMAYDRYVAISNPLRYATILTDSRIAQIGVTIVIRGTVMLTPMVALLKRLTFCSSRVLHHSYCFHPDVMKLSCTDTRINNAVGLTAMISTVGVDSVLILLSYILIIRTVLSIASPEERKKAFSTCISHIGAVAIFYIPLISSFVHRFGKRAPPYVHTMIANTYLLIPPVMNPIIYSVKTKQIRKAVIKVFQSKEI

SEQ ID NO: 1718 - protein, 314 aa, Artificial Sequence
  Synthetic
MPSFNESTAYPPVFFLTGIPGLETSHTWISIPFCCLYAIAISGNSMILFVIITESSLHEPMYYFLSMLSFTDLGLCLSTLVTVLGIFWFNVREISFDACIGQMFFIHGFTFMESSVLLVMAFDRFIAICNPLRYAMILTNSRIIAVGFAIIIRGTTALVPLLLLLKRLSFCRSHVLHHSYCFHPDVMKLSCSDTRINSAFGLAIVISTAGLDSVLILLSYVLIIHSVLCIASKEERKKAFGTCVSHLSAVAIFYIPMISLSLVHRFGKHAPPFVHTLIANVYLLIPPVMNPIIYSVKTKQIRKAMLKVFFVKPS

SEQ ID NO: 1719 - protein, 299 aa, Artificial Sequence [sequence omitted]

SEQ ID NO: 1720 - protein, 322 aa, Artificial Sequence
  Synthetic
MAIFNNTTSSSSNFLLTAFPGLECAHVWISIPVCCLYTIALLGNSMIFLVIITKRRLHKPMYYFLSMLAAVDLCLTITTLPTVLGVLWFHAREISFKACFIQMFFVHAFSLLESSVLVAMAFDRFVAICNPLNYATILTDRMVLVIGLVICIRPAVFLLPLLVAINTVSFHGGHELSHPFCYHPEVIKYTYSKPWISSFWGLFLQLYLNGTDVLFILFSYVLILRTVLGIVARKKQQKALSTCVCHICAVTIFYVPLISLSLAHRLFHSTPRVLSTLANIYLLLPPVLNPIIYSLKTKTIRQAMFQLLQSKGSWGFNVRGLR

SEQ ID NO: 1721 - protein, 324 aa, Artificial Sequence
  Synthetic
YFSFLIVQNNTTSSSSNFLLTAFPGLECAHVWISIPVRCLYTIALLGNSMIFLVIITKRRLHKPMYYFLSMLAAVDLCLTITTLPTVLGVLWFHAREISFKACFIQMFFVHAFSLLESSVLVAMAFDRFVAICNPLNYATILTDRMVLVIGLVICIRPAVFLLPLLVAINTVSFHGGHELSHPFCYHPEVIKYTYSKPWISSFWGLFLQLYLNGTDVLFILFSYVLILRTVLGIVARKKQQKALSTCVCHICAVTIFYVPLISLSLAHRHSTPRVCSTLANIYLLLPPVLNPIIYSLKTKTIRQAMFQLLQSKGSWGFNVRGLR

SEQ ID NO: 1722 - protein, 319 aa, Artificial Sequence
  Synthetic
SPQFMLLSNITQFSPIFYLTSFPGLEGIKHWIFIPFFFMYMVAISGNCFILIIIKTNPRLHTPMYYLLSLLALTDLGLCVSTLPTTMGIFWFNSQSIYFGACQIQMFCIHSFSFMESSVLLMMSFDRFVAICHPLRYSVIITGQQVVRAGLIVIFRGPVATIPIVLLLKAFPYCGSVVLSHSFCLHQEVIQLACTDTTFNNLYGLMVVVFTVMLDLVLIALSYGLILHTVAGLASQEEQRRAFQTCTAHLCAVLVFFVPMMGLSLVHRFGKHAPPAIHLLMANVYLFVPPMLNPIIYSIKTKEIHRAIIKLLGLKKASK

SEQ ID NO: 1723 - protein, 315 aa, Artificial Sequence
  Synthetic
MLLSNITQFSPIFYLTSFPGLEGIKHWIFIPFFFMYMVAISGNCFILIIIKTNPRLHTPMYYLLSLLALTDLGLCVSTLPTTMGIFWFNSHSIYFGACQIQMFCIHSFSFMESSVLLMMSFDRLVAICHPLRYSVIITGQQVVRAGLIVIFRGPVATIPIVLLLKAFPYCGSVVLSHSFCLHQEVIQLACTDITFNNLYGLMVVVFTVMLDLVLIALSYGLILHTVAGLASQEEQRRAFQTCTAPLCAVLVFFVPMMGLSLVHRFGKHAPPAIHLLMANVYLFVPPMLNPIIYSIKTKEIHRAIIKFLGLKKASK

SEQ ID NO: 1724 - protein, 319 aa, Artificial Sequence
  Synthetic
MVLSNITHFSPMFYLSGFPGLEAIEHWIFIPFFLMYLVAISGNCLILIIIKTSPRLHTPMYYLLSLLALTDLGLSVSTLPTMVGIFWFNYHGIYFGACQIQMFCIHSFSFMESAVLLVMSFDRFVAICHPLRYSSIITVQRVMRAGLCVILRGPVALIPIVLLLKDFPYCGPLVLSHSFCLHQEVIHLACVDTTFNNLYGLSLVVFTVMLDLVLIALSYGFILYTVAGLASQEEQIRAFQTCTSHLCAVLVFFVPMMGLSLVHRFGKHAPPAVHLLMANIYLFVPPMLNPVIYSIKTKEIRKAIIRFLGFRKVNSESWG

SEQ ID NO: 1725 - protein, 319 aa, Artificial Sequence
  Synthetic
MVLSNITHFSPMFYLSGFPGLEAFEHWIFIPFFLMYLVAISGNCLILIIIKTNPRLHTPMYYLLSLLALTDLGLSVSTLPTMVGIFWFNYHGIYFGACQIQMFCIHSFSFMESAVLLVMSFDRFVAICHPLRYSSIITVQRVMRAGLCVILRGPVALIPIVLLLKDFPYCGPLVLSHSFCLHQEVIHLACVDTTFNNLYGLSLVVFTVMLDLVLIALSYGFILYTVAGLASQEEQIRAFQTCTSHLCAVLVFFVPMMGLSLVHRFGKHAPPAVHLLMANIYLFVPPMLNPVIYSIKTKEIRKAIIRFLGFRKVNSESWG

SEQ ID NO: 1726 - protein, 323 aa, Artificial Sequence
  Synthetic
MLHVNITNPIFSTFLVTGIPGLEAVYIWIAIPFCAMFLITMVGNMTIIIVIWHEQTLHVPMYLFLAMLASSDLGLSLFTFPTLLRIFLLNDRELTTTACFTQMFFIHTFQLLESAIILAMAFDWYVAISHPLHYHSILTDTVIGKIGLTIVGRTLTLQVPAPILLRRLYFCSSNVLSHSYCLHPDIIKLSCSSTTVNSIFGLFVVLSTLGLDFLLILLSYALILKTVLNMASHSGRLKALNTCISHLCAVVLFFTPMICLSMLHRFGPRLPSHVYVTLANMHFLIPPVMNPIVYVVKTKQIRDKIQKLFIRKATKKAQAASIT

SEQ ID NO: 1727 - protein, 323 aa, Artificial Sequence
  Synthetic
MLHVNITNSIFSTFLVTGIPGLEAVYIWIAIPFCAMFLITMVGNMTIIIVIWHEQTLHVPMYLFLAMLASSDLGLSLFTFPTLLRIFLLNDRELTTTACFTQMFFIHTFQDLESAIILAMAFDRYVAISHPLHYHSILTDTVIAKIGLAIVVRTLTLQVPAPILLRRLYFCRSNVLSHSYCLHPDIIKLSCSSTTVNSIFGLFVVLSTLGLDFLLILLSYALILKTVLSMASHSGRLKALNTCISHLCAVVLFFTPMICLSMLHRFGPRLPSHVYVTLANMHFLIPPVMNPIVYVVKTKQIRDKIQKLFIRKATKKAQAASIT

SEQ ID NO: 1728 - protein, 316 aa, Artificial Sequence
  Synthetic
MFCNTSTPGHSTFLLTGFPGLEASHHWVSIPINLICVVSILGNSVILFLIRTDPALHEPMFIFLSMLAASDLGLCASTFPTMVRLFWLGTRELPFDFCAAQMFFIHAFTYVESGVLLAMAFDRFIAIRNPLHYATILPHSAVAKVGAAVLVRAILLNLPGPILLRRLIFPQISTLSHCYCLHCDLVGLACSDTRINSLVGLVSILLSLGLDSSLIMLSYALILRTVLGIASPGERLKALNTCVSHLCIVLIFYLPKLGLSVLHRVEKHSYPALAVLMANLHFLVPPFMNPVVYCIKSKQIRQGFLRRFQQKRVDIS

SEQ ID NO: 1729 - protein, 316 aa, Artificial Sequence
  Synthetic
MFCNTSTPGHSTFLLTGFPGLEASHHWVSIPINLICVVSILGNSVILFLIRTDPALHEPMFIFLSMLAASDLGLCASTFPTMVRLFWLGTRELPFDFCAAQMFFIHAFTYVESGVLLAMAFDRFIAIRDPLHYATILPHSAVAKVGAAVLVRAILLNLPGPILLRRLIFPQISTLSHCYCLHCDLVGLACSDTRINSLVGLVSILLSLGLDSSLIMLSYALILRTVLGIASPGERLKALNTCVSHLCIVLIFYLPKLGLSVLHRVEKHSYPALAVLMANLHFLVPPFMNPVVYCIKSKQIRQGFLRRFQQKRVDIS

SEQ ID NO: 1730 - protein, 317 aa, Artificial Sequence
  Synthetic
MEITNSSWFQPPTLLLTGIPGLEDVQIWFCIPLCVMYLIALLGNCTILFVIRTTSSLHEPQYIFLSMLAATDVGLSVSTLPTVLNVFLLNHRDIEFHSCLTQMFFIHTFSSMESAILLAMAFDRFVAIRNSLHYTAVLTPTRIIKIGLAAVVRGVMLMIPLPILLKRLPFCKGVILSHCYCYHPDIMKLACGPVRVNIIYGLSLVLCSFGVDSVFIVISYILILKTVLGIASGDGKLKALNTCVSHIFTVFIFYVPLIVLALIHRFGTFASPLLHVTMANLFLFLTPVLNPLVYSLKTKQIRSAVCKIFKVWGNLLK

SEQ ID NO: 1731 - protein, 317 aa, Artificial Sequence
  Synthetic
MEITNSSWFQPPTLLLTGIPGLEDVQIWFCIPLCVMYLIALLGNCTILFVIKTTSSLHEPQYIFLSMLAATDVGLSVSTLPTVLNVFLLNHRDIEFHSCLTQMFFIHTFSSMESAILLAMAFDRFVAIRNPLHYTAVLTPTRIIKIGLAAVVRGVMLMIPLPILLKRLPFCKGVILSHCYCYHPDIMKLACGPVRVNIIYGLSLVLCSFGVDSVFIVISYILILKTVLGIASGDGKLKALNTCVSHIFTVFIFYVPLIVLALIHRFGTFASPLLHVTMANLFLFLTPVLNPLVYSLKTKQIRSAVCKIFKVWGNLLK

SEQ ID NO: 1732 - protein, 313 aa, Artificial Sequence
  Synthetic
MSEFNTTFQPSVFILTGLRGLVGARLWLGPLLSLMYITTLAGNCTVIYLVRTERSLQEPQYQFLSMLAGADIVLSVSTLFSVLKVFIFDLYEIAFDSCLAQLFFIHTSSSMGSGILLAMAFDRFVAISHPLQYTTILTNSRVTRMGLAAFLRGVALMMPLPILLKRLPFCKGQLLSYSYCIHPNVMKLACGQVKINIFYGLVLVIFSFGVDFLLIAISYALIFQAVMGIASREGQMKALNTCLSHIFIVFIYYGPLLAITVMHRISRRSSPIAHAVLGNIYLFMPPMLNPIVYSLKTKQIRSALRKSLKIQRR

SEQ ID NO: 1733 - protein, 319 aa, Artificial Sequence
  Synthetic
MSSCNFTHATFVLIGIPGLEKAHFWVGFPLLSMYVVAMFGNCIVVFIVRTERSLHAPMYLFLCMLAAIDLALSTSTMPKILALFWFDSREISFEACLTQMFFIHALSAIESTILLAMAFDRYVAICHPLRHAAVLNNTVTAQIGIVAVVRGSLFFFPLPLLIKRLAFCHSNVLSHSYCVHQDVMKLAYADTLPNVVYGLTAILLVMGVDVMFISLSYFLIIRTVLQLPSKSERAKAFGTCVSHIGVVLAFYVPLIGLSVVHRFGNSLHPIVRVVMGDIYLLLPPVINPIIYGAKTKQIRTRVLAMFKISCDKDLQAVGG

SEQ ID NO: 1734 - protein, 319 aa, Artificial Sequence; identical to SEQ ID NO: 1733
  Synthetic

SEQ ID NO: 1735 - protein, 319 aa, Artificial Sequence
  Synthetic
MSSCNFTHATFLLIGIPGLEEAHFWFGFPLLSMYAVALFGNCIVVFIVRTERSLHAPMYLFLCMLAAIDLALSTSTMPKILALFWFDSREITFDACLAQMFFIHTLSAIESTILLAMAFDRYVAICHPLRHAAVLNNTVTVQIGMVALVRGSLFFFPLPLLIKRLAFCHSNVLSHSYCVHQDVMKLAYTDTLPNVVYGLTAILLVMGVDVMFISLSYFLIIRTVLQLPSKSERAKAFGTCVSHISVVLAFYVPLIGLSVVHRFGNSLDPIVHVLMGDVYLLLPPVINPIIYGAKTKQIRTRVLAMFKISCDKDIEAGGN

SEQ ID NO: 1736 - protein, 317 aa, Artificial Sequence
  Synthetic
LVPLIATPNGSLAHPAYFLLVGIPGLSKIHFWLAFPLCFMYAVATLGNLAIIFIIRVERRLHEPMYLFLAMLSTIDLVLSSVTMPKMASLFLTGIQEIEFNICLTQMFLIHALSAMESAVLLAMAFDRFVAICYPLRHASVLTGTTVAKIGLASLARGFVFFFPLPFLLKRLSYCQTHTVTHSFCLHQDIMKLSCTDTKVNVVYGLFIILSVMGVDSLFIGFSYILILRAVLELSTRGAALKAFNTCISHLCAVLVFYVPLIGLSVVHRLGGPTSLVHVVMANIYLLLPPVVNPIVYGAKTKEIRSRVIRMFSQDGR

SEQ ID NO: 1737 - protein, 315 aa, Artificial Sequence
  Synthetic
PIIATSNGNLVHAAYFLLVGIPGLPTIHFWLAFPLCFMYALATLGNLTIVLIIRVERRLHEPMYLFLAMLSTIDLVLSSITMPKMASLFLMGIQEIEFNICLAQMFLIHALSAVESAVLLAMAFDRFVAICHPLRHASVLTGCTVAKIGLSALTRGFVFFFPLPFILKWLSYCQTHTVTHSFCLHQDIMKLSCTDTRVNVVYGLFIILSVMGVDSLFIGFSYILILWAVLELSSRRAALKAFNTCISHLCAVLVFYVPLIGLSVVHRLGGPTSLLHVVMANTYLLLPPVVNPLVYGAKTKEICSRVLCMFSQGGK

SEQ ID NO: 1738 - protein, 315 aa, Artificial Sequence; identical to SEQ ID NO: 1737
  Synthetic

SEQ ID NO: 1739 - protein, 317 aa, Artificial Sequence
  Synthetic
MMVDPNGNESSATYFILIGLPGLEEAQFWLAFPLCSLYLIAVLGNLTIIYIVRTEHSLHEPMYIFLCMLSGIDILISTSSMPKMLAIFWFNSTTIQFDACLLQMFAIHSLSGMESTVLLAMAFDRYVAICHPLRHATVLTLPRVTKIGVAAVVRGAALMAPLPVFIKQLPFCRSNILSHSYCLHQDVMKLACDDIRVNVVYGLIVIISAIGLDSLLISFSYLLILKTVLGLTREAQAKAFGTCVSHVCAVFIFYVPFIGLSMVHRFSRRDSPLPVILANIYLLVPPVLNPIVYGVKTKEIRQRILRLFHVATHASEP

SEQ ID NO: 1740 - protein, 317 aa, Artificial Sequence; identical to SEQ ID NO: 1739
  Synthetic

SEQ ID NO: 1741 - protein, 317 aa, Artificial Sequence
  Synthetic
MVGFNSNESSATYFILIGLPGLEEVQFWLAFPLCSLYLIAVLGNLTIIYIVRTEHSLHEPMYIFLCMLSGLDILISTSSMPKMMAIFWFNSTTIQFDACLVQMFAIHSLSGMESTVLLAMAFDRYVAICHPLRHATVLTLPRVAKIGMAAVVRGAVLMAPLPVFIKRLPFCRSNILSHSYCLHQDVMKLACADIRVNIIYGLIVIISAIGLDSLLISFSYLLILKTVLGLTREAQAKAFGTCVSHVCAVFIFYVPFIGLSMVHRFSKRRDSLLPVIMANIYLLVPPVLNPIVYGVKTKEIRQRILRLFLVTTHTSDH

SEQ ID NO: 1742 - protein, 317 aa, Artificial Sequence; identical to SEQ ID NO: 1741
  Synthetic

SEQ ID NO: 1743 - protein, 314 aa, Artificial Sequence
  Synthetic
MPSCNNSIPQPLIFILAGIPGLESSHGWFSISFFLIFVVTIIGNVTILHIIWIEKTLHEPMFLLLATLSVVDLCLVTVTVPRMLGIFWLNAKEISLEACLTQMFFIPSFYVMESGILLAMAFDRFAAIWYPLRYTTILDSNMLVKMALAILARAVAVVTPAPILTKRLERFQTQVISYSYCAYMAVVMIACGDISNHIVYGLMVIVASVGIDLFLVILSYTLILRAVFHIPSWQARSKALSTCGSHLCVIGLFYSPVVFSVLSQILGYHMAPYLQIIIDNLYFLVPPMVNPLIYAVRTKQIRERVLRILNCERK

SEQ ID NO: 1744 - protein, 314 aa, Artificial Sequence
  Synthetic
MPSCNNSIPQPLIFILAGIPDLESSHGWFSISFFLIFVVTIIGNVTILHIIWIEKTLHEPMFLLLATLSVVDLCLVTVTVPRMLGIFWLNAKEISLEACLTQMFFIPSFYVMESGILLAMAFDRFAAIWYPLRYTTILDSNMLVKMALAILARAVAVVTPAPILTKRLERFQTQVISYSYCAYMAVVMIACGDISNHIVYGLMVIVASVGIDLLLVILSYTLILRAVFHIPSWQARSKALSTCGSHLCVIGLFYSPVVFSVLSQILGYHMAPYLQIIIDNLYFLVPPMVNPLIYAVRTKQIRERVLRILNCERK

SEQ ID NO: 1745 - protein, 313 aa, Artificial Sequence
  Synthetic
MPIANDTQFHTSSFLLLGIPGLEDVHIWIGFPFFSVYLIALLGNAAIFFVIQTEQSLHEPMYYCLAMLDSIDLSLSTATIPKMLGIFWFNIKEISFGGYLSQMFFIHFFTVMESIVLVAMAFDRYIAICKPLWYTMILTSKIISLIAGIAVLRSLYMVIPLVFLLLRLPFCGHRIIPHTYCEHMGIARLACASIKVNIMFGLGSISLLLLDVLLIILSHIRILYAVFCLPSWEARLKALNTCGSHIGVILAFSTPAFFSFFTHCFGHDIPQYIHIFLANLYVVVPPTLNPVIYGVRTKHIRETVLRIFFKTDH

SEQ ID NO: 1746 - protein, 313 aa, Artificial Sequence; identical to SEQ ID NO: 1745
  Synthetic

SEQ ID NO: 1747 - protein, 317 aa, Artificial Sequence
  Synthetic
MAGRMSTSNHTQFHPSSFLLLGIPGLEDVHIWIGVPFFFVYLVALLGNTALLFVIQTEQSLHEPMYYFLAMLDSIDLGLSTATIPKMLGIFWFNTKEISFGGCLSHMFFIHFFTAMESIVLVAMAFDRYIAICKPLRYTMILTSKIISLIAGIAVLRSLYMVVPLVFLLLRLPFCGHRIIPHTYCEHMGIARLACASIKVNIRFGLGNISLLLLDVILIILSYVRILYAVFCLPSWEARLKALNTCGSHIGVILAFFTPAFFSFLTHRFGHNIPQYIHIILANLYVVVPPALNPVIYGVRTKQIRERVLRIFLKTNH

SEQ ID NO: 1748 - protein, 313 aa, Artificial Sequence
  Synthetic
MSTSNHTQFHPSSFLLLGIPGLEDVHIWIGVPFFFVYLVALLGNTALLFVIQTEQSLHEPMYYFLAMLDSIDLGLSTATIPKMLGIFWFNTKEISFGGCLSHMFFIHFFTAMESIVLVAMAFDRYIAICKPLRYTMILTSKIISLIAGIAVLRSLYMVVPLVFLLLRLPFCGHRIIPHTYCEHMGIARLACASIKVNIRFGLGNISLLLLDVILIILSYVRILYAVFCLPSWEARLKALNTCGSHIGVILAFFTPAFFSFLTHRFGHNIPQYIHIILANLYVVVPPALNPVIYGVRTKQIRERVLRIFLKTNH

SEQ ID NO: 1749 - protein, 313 aa, Artificial Sequence
  Synthetic
NLLQNAPSNITEAHPLSFLLLGIPGLEATQFWLGFPFCVVYLTALVGNLIILFVIWTDRTFHQPMFYFLAMLSVIDLSLSTATIPKMLGIFWFSLQELCFACCVAQVFFIHFFTVMESIVLLAMGFDRYVAICNPLRYTTILTNRIIVVIAVLVVIRSLCMIVPIIFLLLRLPYCGHRIIPHTYCEHMGVARLACASIRANIYFGLGNISILFLDVFLIIVSYARILYAVFHLPSQDARLKALNTCSSHICVILAFFGPALFSFLTHRFGHNIPQYIHILLANLYVVIPPALNPVIYGIRTKQIQQRVKNLFV

SEQ ID NO: 1750 - protein, 313 aa, Artificial Sequence; identical to SEQ ID NO: 1749
  Synthetic

SEQ ID NO: 1751 - protein, 312 aa, Artificial Sequence
  Synthetic
MSPGNSSWIHPSSFLLLGIPGLEELQFWLGLPFGTVYLIAVLGNVIILFVIYLEHSLHQPMFYLLAILAVTDLGLSTATVPRALGIFWFGFHKIAFRDCVAQMFFIHLFTGIETFMLVAMAFDRYIAICNPLRYNTILTNRTICIIVGVGLFKNFILVFPLIFLILRLSFCGHNIIPHTYCEHMGIARLACVSIKVNVLFGLILISMILLDVVLIALSYAKILHAVFKLPSWEARLKALNTCGSHVCVILAFFTPAFFSFLTHRFGHNIPRYIHILLANLYVIIPPALNPLIYGVRTKQIRDRVVIFFCKEV

SEQ ID NO: 1752 - protein, 322 aa, Artificial Sequence
  Synthetic
MFLPNDTQFHPSSFLLLGIPGLETLHIWIGFPFCAVYMIALIGNFTILLVIKTDSSLHQPMFYFLAMLATTDVGLSTATIPKMLGIFWINLRGIIFEACLTQMFFIHNFTLMESAVLVAMAYDSYVAICNPLQYSAILTNKVVSVIGLGVFVRALIFVIPSILLILRLPFCGNRVIPHTYCEHMGLAHLSCASIKINIIYGLCAICNLVFDITVIALSYVHILCAVFRLPTHEARLKSLSTCGSHVCVILAFYTPALFSFMTHCFGRNVPRYIHILLANLYVVVPPMLNPVIYGVRTKQIYKCVKKILLQEQGMEKEEYLIH

SEQ ID NO: 1753 - protein, 322 aa, Artificial Sequence
  Synthetic
MFLPNDTQFHPSSFLLLGIPGLETLHIWIGFPFCAVYMIALIGNFTILLVIKTDSSLHQPMFYFLAMLATTDVGLSTATIPKMLGIFWINLRGIIFEACLTQMFFIHNFTLMESAVLVAMAYDSYVAICNPLQYSAILTNKVVSVIGLGVFVRALIFVIPSILLILRLPFCGNHVIPHTYCEHMGLAHLSCASIKINIIYGLCAICNLVFDITVIALSYVHILCAVFRLPTHEARLKSLSTCGSHVCVILAFYTPALFSFMTHRFGRNVPRYIHILLANLYVVVPPMLNPVIYGVRTKQIYKCVKKILLQEQGMEKEEYLIH

SEQ ID NO: 1754 - protein, 317 aa, Artificial Sequence
  Synthetic
MILPNDTQFHPSTFLLLGIPGLESLHIWIGFPFCVVYMIALLGNLTILFVIKTESSLHQPMFYFLAMLATIDLGLSTATIPKMLGIFWINLREILFEDCLIQMFFIHKFTLMESTVLLAMAYDHYVAICIPLRYSTILTNKVVSMIGIAVLVRAIIFVIPFIFLILRLPFCGHHIIPHTYCEHMGLARLSCASVKANVIYGLCAICNLLFDIVAIVLSYIQILRVVFHLPSREARLKSLNTCGSHVCVILAFYTPALFSFMTHRFGRNVPRYIHILLANLYVVVPPMLNPVIYGVRTKQIYDRVKKILLQVRGKEKE

SEQ ID NO: 1755 - protein, 311 aa, Artificial Sequence
  Synthetic
MLLSNDTQFHPSSFLLLGIPGLESHHTWIGFPFCAVYLIALLGNFTILLVIKTESSLHQPMFYFLAMLATIDLGLSTATIPKMLGIFWFSFRVILFGACLTQMFFIHNFTGMESAVLLAMAYDRYVAICNPLRYSTILTNKAVFMIGLGVLVRSFLSVIPFVFLILRLPFCGNNVIPHTYCEHMGLARLSCANIKVNIIYGLGAISILFFDIIAIALSYAQILRAVFRLPSREARIKSLSTCGSHVCVILAFYTPALFSFMTHRFGRNVPRYIHILLANLYVVVPPMLNPVIYGVRTKQIYDRVKKIFLQK

SEQ ID NO: 1756 - protein, 308 aa, Artificial Sequence [sequence omitted]

SEQ ID NO: 1757 - protein, 312 aa, Artificial Sequence
  Synthetic
MPSINDTHFYPPFFLLLGIPGLDTLHIWISFPFCIVYLIAIVGNMTILFVIKTEHSLHQPMFYFLAMLSMIDLGLSTSTIPKMLGIFWFNLQEISFGGCLLQMFFIHMFTGMETVLLVVMAYDRFVAICNPLQYTMILTNKTISILASVVVGRNLVLVTPFVFLILRLPFCGHNIVPHTYCEHRGLAGLACAPIKINIIYGLMVISYIIVDVILIASSYVLILRAVFRLPSQDVRLKAFNTCGSHVCVMLCFYTPAFFSFMTHRFGQNIPHYIHILLANLYVVVPPALNPVIYGVRTKQIREQIVKIFVQKE

SEQ ID NO: 1758 - protein, 312 aa, Artificial Sequence [sequence omitted]

SEQ ID NO: 1759 - protein, 312 aa, Artificial Sequence
  Synthetic
MSSINSTQFHPSFFILVGIPGLEIFHIWIAFPFCLVYLTSLVGNITILFVIKTEHSLHQPMFYFLATLSIIDLCLSTSTIPKMLGIFWFNLREISFGGCLAQMFFIHVFTGMETVLLVVMAYDRFVAICKPLQYTTILTNKTISLLLSVVIGRNLILVTPFVFLILRLPFCGHHIMPHTYCEHMGLARLACAPIKINIIYGLVVISHILVDMILIASSYVLILRAVFRIPSQDARLKALNTCGSHVCIMLCFYTPALFSFMTHRFGQNIPHYIHILLANLYVVIPPALNPVIYGVRTKQIREKIIKIVVQKE

SEQ ID NO: 1760 - protein, 312 aa, Artificial Sequence
  Synthetic
MSSSNGTEFHPSFFLLLGVPGLEKLHVWIGFPFCFVYLIALVGNIIILFVIKSEHSLHQPMFYFLAMLGSIDLGLSTSTIPKMLGIFWFNLREISFGGCVTQMFFIHIFTAMETVVLVAMAFDRYVAICNPLRYSQILTNRTIGLILVVVFGVNFILLIPLVFLILRLPFCGHHIIPHTYCEHMGIARLACANIKVNMIFGLILISMVLADVLLIAISYMRILRAVFCLPSRDARLKALNTCGSHICVILAFFTPAFFSFMTHRFGRNVPAYIHILLANLYVVVPPALNPVIYGVRTKQIRDQVLSIFWKKT

SEQ ID NO: 1761 - protein, 312 aa, Artificial Sequence
  Synthetic
MPSNNETASHPSLFHLLGIPGLEAFHIWIAFPFFVVYPIALVGNFTILCVIKNEQSLHQPMFYFLALLSFIDLGLSTSTIPKMLGIFWFNLREISFEGCLIQMFFIHTYTGMESVVLLAMAIDRFVAICYPLRYTSVLTNKVVAVMASVVIGRPVLLVIPFCPLLKRLPFCGHYIIPHTYCEHMGIARLACANIRINIIYGLFTIAALIFDLILIAFSYAWILQAVFRLPSRDARHKALSTCGSHVCVILAFYTPAFFSFMTHRFGRNVPRYIHILLANLYVVVPPCLNPVIYGVRTKQIREGVLKIFVKKE

SEQ ID NO: 1762 - protein, 320 aa, Artificial Sequence
  Synthetic
MLHTNNTQFHPSTFLVVGVPGLEDVHVWIGFPFFAVYLTALLGNIIILFVIQTEQSLHQPMFYFLAMLAGTDLGLSTATIPKMLGIFWFNLGEIAFGACITQMYTIHICTGLESVVLTVTGIDRYIAICNPLRYSMILTNKVIAILGIVIIVRTLVFVTPFTFLILRLPFCGVRIIPHTYCEHMGLAKLACASINVIYGLIAFSVGYIDISVIGFSYVQILRAVFHLPAWDARLKALSTCGSHVCVMLAFYLPALFSFMTHRFGHNIPHYIHILLANLYVVFPPALNSVIYGVKTKQIREQVLRILNPKSFWHFDPKRIF

SEQ ID NO: 1763 - protein, 320 aa, Artificial Sequence
  Synthetic
MLHTNNTQFHPSTFLVVGVPGLEDVHVWIGFPFFAVYLTALLGNIIILFVIQTEQSLHQPMFYFLAMLAGTDLGLSTATIPKMLGIFWFNLGEIAFGACITQMYTIHICTGLESVVLTVTGIDRYIAICNPLRYSMILTNKVIAILGIVIIVRTLVFVTPFTFLILRLPFCGVRIIPHTYCEHMGLAKLACASINVIYGLIAFSVGYIDISVIGFSYVQILRAVFHLPAWDARPKALSTCGSHVCVMLAFYLPALFSFMTHRFGHNIPHYIHILLANLYVVFPPALNSVIYGVKTKQIREQVLRILNPKSFWHFDPKRIF

SEQ ID NO: 1764 - protein, 313 aa, Artificial Sequence
  Synthetic
MLHSNKTQFHPSSFLLIGIPGLEELHLWIGFPFFAVYLIAVLGNIIILFVIQTERSLHQPMFYFLAMLACTDLGLSTATIPKMLGIFWFNLREIAFGACITQMYIIHTCTGLESVVLTIMAIDRYIAICYPLRYSMILTNKVIAILGIIIIVRTLIFVTPFIFLILRLPFCGVRIIPHTYCEHMGLAKLACANIKVNVIYGLVAFSVGYIDLSVIGFSYIRILQAVFRLPSWDARLKALSTCGSHVSVMLAFYLPALFSFMTHRFGHNIPHYIHILLANLYVVVPPALNPVIYGVRTKQIRERVLRMLNPKMH

SEQ ID NO: 1765 - protein, 310 aa, Artificial Sequence
  Synthetic
MFYHNKSIFHPVTFFLIGIPGLEDFHMWISGPFCSVYLVALLGNATILLVIKVEQTLREPMFYFLAILSTIDLALSATSVPRMLGIFWFDAHEINYGACVAQMFLIHAFTGMEAEVLLAMAFDRYVAICAPLHYATILTSLVLVGISMCIVIRPVLLTLPMVYLIYRLPFCQAHIIAHSYCEHMGIAKLSCGNIRINGIYGLFVVSFFVLNLVLIGISYVYILRAIFRLPSHDAQLKALSTCGAHVGVICVFYIPSVFSFLTHRFGHQIPGYIHILVANLYLIIPPSLNPIIYGVRTKQIREVLYVFTKK

SEQ ID NO: 1766 - protein, 311 aa, Artificial Sequence
  Synthetic
MFYHNKSIFHPVTFFLIGIPGLEDFHMWISGPFCSVYLVALLGNATILLVIKVEQTLREPMFYFLAILSTIDLALSTTSVPRMLGIFWFDAHEINYGACVAQMFLIHAFTGMEAEVLLAMAFDRYVAVCAPLHYATILTSQVLVGISMCIVIRPVLLTLPMVYLIYRLPFCQAHIIAHSYCEHMGIAKLSCGNIRINGIYGLFVVSFFVLNLVLIGISYVYILRAVFRLPSHDAQLKALSTCGAHVGVICVFYIPSVFSFLTHRFGHQIPGYIHILVANLYLIIPPSLNPIIYGVRTKQIRERVLYVFTKK

SEQ ID NO: 1767 - protein, 312 aa, Artificial Sequence
  Synthetic
MTIHNNRSVSHPDTFFLIGIPGLEEIHAWISLPFCCIYLVALMGNTMILVVIKTERSLREPMFYFLAILSSVDLALSTTSVPRMLGIFWFDAHEINFGGCVAQMFLIHAFTGMEAEVLMAMAFDRYVAICAPLHYTTILTSRVLMGISICVVIRPALFICPMVYLIYRLPFCQAHVIAHSYCEHMGIAKLSCGDIHINAVYGLFVVSLFLLNLVLIGISYGYILRAVFRLPSQDARLKALSTCGSHVAVLCVFYIPSVFSFLTHRFGHNIPHYIHILVANLYLVIPPSLNPIIYSVRTKQIREHVLHIFTKR

SEQ ID NO: 1768 - protein, 316 aa, Artificial Sequence
  Synthetic
MSDSNLSNHLPDTFFLTGIPGLEAAHFWIAIPFCAMYLVALVGNAALILVIAMDNALHAPMYLFLCLLSLTDLALSSTTVPKMLAILWLHAGEISFGGCLAQMFCVHSIYALESSILLAMAFDRYVAICNPLRYTTILNHAVIGRIGFVGLFRSVAIVSPFIFLLRRLPYCGHRVMTHTYCEHMGIARLACANITVNIVYGLTVALLAMGLDSILIAISYGFILHAVFHLPSHDAQHKALSTCGSHIGIILVFYIPAFFSFLTHRFGHHEVPKHHIFLANLYVLVPPVLNPILYGARTKEIRSRLLKLLHLGKTSI

SEQ ID NO: 1769 - protein, 310 aa, Artificial Sequence
  Synthetic
SESLPVTLFLTGIPGLEFAHLWIAIPFCVMYVVALLGNAALILIIGTESVLHTPMYLFLCLLSLTDLALSSTTVPKMLAILWLHSNEISFGGCLAQMFCVHSIYALESSVLLAMAFDRYVAICNPLRYTTILNHTVIAQIIFAGIVRSVAIVSPFIFLLRRLPYCGHRVMTHTYCEHMGIARLACANITVNIVYGLTVALLAMGLDSILIAISYGFILRAVFRLPSRDAQHKALSTCGSHLGVILVFYIPAFFSFLTHRFGNRVPKHVHIFLANLYVLVPPVLNPIIYGARTKEIRSRLLKLLHLGKDLV

SEQ ID NO: 1770 - protein, 317 aa, Artificial Sequence
  Synthetic
MMLSAAIPNGTAFHPPTFVLLGIPGMQDQHVWIAIPFCSMYILALVGNGTILYIIITDRALHEPMYLFLCLLSITDLVLCSTTLPKMLAIFWLRSHVISYHGCLTQMFFVHAVFATESAVLLAMAFDRYVAICRPLHYTSILNAVVIGKIGLACVTRGLLFVFPFVILIERLPFCGHHIIPHTYCEHMGIAKLACASIKPNTIYGLTVALSVTGMDVVLIATSYILILQAVLRLPSKDAQFRAFSTCGAHICVILVFYIPAFFSFFTHRFGHHVPPQVHIILANLYLLVPPVLNPLVYGINTKQIRLRILDFFVKRR

SEQ ID NO: 1771 - protein, 317 aa, Artificial Sequence
  Synthetic
MMLSAAIPNETAFHPPTFVLLGIPGMQDQHVWIAIPFCSMYILALVGNGTILYIIITDRALHEPMYLFLCLLSITDLVLCSTTLPKMLAIFWLRSHVISYHGCLTQMFFVHAVFATESAVLLAMAFDRYVAICRPLHYTSILNAVVIGKIGLACVTRGLLFVFPFVILIERLPFCGHHIIPHTYCEHMGIAKLACASIKPNTIYGLTVALSVTGMDVVLIATSYILILQAVLRLPSKDAQFRAFSTCGAHICVILVFYIPAFFSFFTHRFGHHVPPQVHIILANLYLLVPPVLNPLVYGINTKQIRLRILDFFVKRR

SEQ ID NO: 1772 - protein, 318 aa, Artificial Sequence
  Synthetic
SASAMIIFNLSSYNPGPFILVGIPGLEQFHVWIGIPFCIIYIVAVVGNCILLYLIVVEHSLHEPMFFFLSMLAMTDLILSTAGVPKALSIFWLGAREITFPGCLTQMFFLHYNFVLDSAILMAMAFDRYVAICSPLRYTTILTPKTIIKSAMGISFRSFCIILPDVFLLTCLPFCRTRIIPHTYCEHIGVAQLACADISINFWYGFCVPIMTVISDVILIAVSYAHILCAVFCLPSQDARQKALGTCGSHVCVILMFYTPAFFSILAHRFGHNVSRTFHIMFANLYIVIPPALNPMVYGVKTKQIRDKVILLFSKGTG

SEQ ID NO: 1773 - protein, 314 aa, Artificial Sequence
  Synthetic
MIIFNLSSYNPGPFILVGIPGLEQFHVWIGIPFCIIYIVAVVGNCILLYLIVVEHSLHEPMFFFLSMLAMTDLILSTAGVPKALSIFWLGAREITFPGCLTQMFFLHYNFVLDSAILMAMAFDHYVAICSPLRYTTILTPKTIIKSAMGISFRSFCIILPDVFLLTCLPFCRTRIIPHTYCEHIGVAQLACADISINFWYGFCVPIMTVISDVILIAVSYAHILCAVFGLPSQDACQKALGTCGSHVCVILMFYTPAFFSILAHRFGHNVSRTFHIMFANLYIVIPPALNPMVYGVKTKQIRDKVILLFSKGTG

SEQ ID NO: 1774 - protein, 316 aa, Artificial Sequence
  Synthetic
MITSNVSSYNPGPFLLVGIPGLEHFHVWIGIPFCVIYIIAVVGNCILLYLITVERSLHEPMFFFLSMLAMTDLILSTDGVPKTLSIFWMGAREITFPGCLTQMFFLHYSFVLDSAILMAMAFDRYVAICSPLRYATILTPKTIVKIAVGISFRSFCIILPVVFLLTRLPFCRTRIIPHTYCEHIGVARLACADISINIWYGFCVPIMTVISDVVLIAVSYTLILCAVFRLPSRDARQKALGTCGSHVCVILMFYTPAFFSILAHRFGHNVSLTFHIMFANLYIVIPPAMNPIVYGVKTKQIREKVILLFSVKSIDG

SEQ ID NO: 1775 - protein, 312 aa, Artificial Sequence
  Synthetic
MVMHNVSSYNTGPFTLSGIPGLEQYHVWISIPFCFIYLVAILGNSILLYLIAVEHSLHSPMFFFLSMLAMTDLILSTTCVPKTLSIFWFGPQEISFPGCLTQLFFLHYSFVLDSAILLAMAFDRYVAICSPLRYTTILTPKTIVKIAVGISFRSFCVFVPCVFLVNRLPFCRTHIIAHTYCEHIGVARLACADISINIWYGFCVPIMTVIIDVILIAISYTLILCAVFRLPSRDARQKALSTCGSHVCVILMFYIPAFFSILAHRFGRNVPRTFHIMFANLYVIIPPALNPIVYGVKTKQIRDKAILLLFPK

SEQ ID NO: 1776 - protein, 313 aa, Artificial Sequence
  Synthetic
MYNLSCYNPASFTLVGIPGLEKFHIWIGIPFCVIYVVAIVGNCILLYLIAVEQSLHEPMFIFLSMLASTDLILSTATVPKLLSNLWFGSQEITFSGCLTQMFFLHFSFVVDSAILLAMAFDRYVAICLPLRYSTILTPQVIVKIMVSIIVRSFSVILPDVFLLRRLPFCKTRVIPHTYCEHIGVARLSSADISINIWYGFSVPLMTVISDVILIAVSYIFILRAVFLLSSQGARQKALSTCGSHICVILMFYTPAFFSILAHRFGHSVPRNVLILFANFYVAIPPALNPVVYGVKTKQIQDKFLLFFSLRKTQ

SEQ ID NO: 1777 - protein, 317 aa, Artificial Sequence
  Synthetic
MTIMATFNLSSFNPGFFILLGIPGLEQFHVWIGIPFFIIYLVAFAGNSILLYLIFMERSLHEPMFFFLSLLAGTDLILCNTCVPKTFSIFWLGPQHITFPGCLTQMFFLHFSFAMDSAILLSMAFDRYVAICFPLRYTTILTHQIVIKIVVAIISRSFCIIFPCVFLLKRLPFCRELVIPHTYCEHIGIARLACADISINIWYGFAVPIMTVMSDLILIGISYTVILRAVFNLPSQDARKKALSTCGSHVCVILIFYTPAIFVLVHRFGHNIPHSFHILFANLYVSIPPAINPVIYGVKTKQIRDKINLLFFPKDNH

SEQ ID NO: 1778 - protein, 323 aa, Artificial Sequence
  Synthetic
MSHTNVTIFHPAVFVLPGIPGLEAYHIWLSIPLCLIYITAVLGNSILIVVIVMERNLHVPMYFFLSMLAVMDILLSTTTVPKALAIFWLQAHNIAFDACVTQGFFVHMMFVGESAILLAMAFDRFVAICAPLRYTTVLTWPVVGRIALAVITRSFCIIFPVIFLLKRLPFCLTNIVPHSYCEHIGVARLACADITVNIWYGFSVPIVMVILDVILIAVSYSLILRAVFRLPSQDARHKALSTCGSHLCVILMFYVPSFFTLLTHHFGRNIPQHVHILLANLYVAVPPMLNPIVYGVKTKQIREGVAHRFFDIKTWCCTSPLGS

SEQ ID NO: 1779 - protein, 323 aa, Artificial Sequence; identical to SEQ ID NO: 1778
  Synthetic

SEQ ID NO: 1780 - protein, 322 aa, Artificial Sequence
  Synthetic
MIHSNITPIHPAFFVLVGIPGLEAYHTWLSIPLCLMYVTAVLGNSILIMVIITERNLHEPMYFFLSMLAITDILLSTTTVPKALTIFWLHAHNIAFDACVTQVFFVHTMFVGESAILLAMAFDRFIAICAPLRYATVLTWSTVGRIALAIVIRSICIIFPVIFLLKRLPFCRTNIVPHSYCEHIGVARLACADITVNIWYGFSVPIVMVIVDVILIAVSYSLILRAVFRLPSQDARHKALSTCGSHLCVILMFYVPSFFTLLTHRFGRNIPRHVHILLANLYVVVPPMLNPIVYGVKTKQIREGVVHWFLDIKTLCCSSPLG

SEQ ID NO: 1781 - protein, 315 aa, Artificial Sequence
  Synthetic
MLGTNFTIIHPTVFILLGIPGLEQYHTWLSIPFCLMYIAAVLGNGALILVVLSERTLHEPMYVFLSMLAGTDILLSTTTVPKTLAIFWFHAGEIPFDACIAQMFFIHVAFVAESGILLAMAFDRYVAICTPLRYSAVLTPMAIGKMTLAIWGRSIGTIFPIIFLLKRLSYCRTNVIPHSYCEHIGVARLACADITVNIWYGFSVPMASVLVDVALIGISYTLILQAVFRLPSQDARHKALNTCGSHIGVILLFFIPSFFTFLTHRFGKNIPHHVHILLANLYVLVPPMLNPIIYGAKTKQIRDSMTRMLSVVWKS

SEQ ID NO: 1782 - protein, 317 aa, Artificial Sequence
  Synthetic
NSIGAMNNSDTRIAGCFLTGIPGLEQLHIWLSIPFCIMYIAALEGNGILICVILSQAILHEPMYIFLSMLASADVLLSTTTMPKALANLWLGYSHISFDGCLTQMFFIHFLFIHSAVLLAMAFDRYVAICSPLRYVTILTSKVIGKIVTATLSRSFIIMFPSIFLLEHLHYCQINIIAHTFCEHMGIAHLSCSDISINVWYGLAAALLSTGLDIMLITVSYIHILQAVFRLLSQDARSKALSTCGSHICVILLFYVPALFVFAYRFGRSIPCYVHILLASLYVVIPPMLNPVIYGVRTKPILEGAKQMFSNLAKGSK

SEQ ID NO: 1783 - protein, 320 aa, Artificial Sequence
  Synthetic
SANSIGAMNNSDTRIAGCFLTGIPGLEQLHIWLSIPFCIMYITALEGNGILICVILSQAILHEPMYIFLSMLASADVLLSTTTMPKALANLWLGYSLISFDGCLTQMFFIHFLFIHSAVLLAMAFDRYVAICSPLRYVTILTSKVIGKIVTAALSHSFIIMFPSIFLLEHLHYCQINIIAHTFCEHMGIAHLSCSDISINVWYGLAAALLSTGLDIMLITVSYIHILQAVFRLLSQDARSKALSTCGSHICVILLFYVPALFVFAYRFGGRSVPCYVHILLASLYVVIPPMLNPVIYGVRTKPILEGAKQMFSNLAKGSK

SEQ ID NO: 1784 - protein, 317 aa, Artificial Sequence
  Synthetic
MATSSTTLNYTNVRDIWYTMIGIPGLEYAHIWISIPICSMYIVAIAGNALLLFLIITERSLHEPMYLFLSMLALADIFLSTVTTPKMLAIFWFRAGGISFASCVSQMFFLHFIFVAESAILLAMAFDRYVAICYPLRYTTILTTSVIIKMGIAAVIRSFFICFPLIFLVYRLTYCGKSTIRHSYCEHMGIARLACDSIKVNIYYGVIVALFSTCLDAVLIIVSYALILCAVFRIPSRDARLKALGTCGSHVCVILLFYTPAFFSFFAHRFGHSIPLHVHILLANLYVVVPPSVNPIIYGVKTKQIQERVIQVFSLGK

SEQ ID NO: 1785 - protein, 319 aa, Artificial Sequence
  Synthetic
MTSSTYLNHTILRDIWYTMIGIPGLEDAHIWLSIPIFSMYIVAVIGNTFLILLISIEHSLHEPMYFFLTMLALADIFLSTVTIPKVLAIFWFQDRSISFASCVSQMFFLHFIFVTESGILLSMAFDRYVAICYPLRYTTILTPSVIIKMGIAAVTRSFFICFPLIFLVYRLTYCGKSIIRHSYCEHMGIARLACDSIKVNIYYGLIVALFSIFLDVVLIIVSYARILCAVYRIPSQDTRLKALSTCGSHVCVILLFYMPVFFSSLGHRFGDSIPLHVHILLANLYVVLPPSLNPIIYGVKTKQIQERVVQLFSLNKVIC

SEQ ID NO: 1786 - protein, 317 aa, Artificial Sequence
  Synthetic
MTMSSNHTNLRDIWYTMIGIPGLEDAHVWLSIPICSMYIVALIGNTLLIFLIFTEHSLHEPMYLFLSMLALADIILSTVTTPKVLAIFWFQAGGISFASCVSQMFFLHFMFVTESAILLAMAIDRYIAICFPLRYTTILTPSVICRMGIASVTRSFLIIFPLVFLVYRLNYCGRNIIRHSYCEHMGIARLACDSIKVNIYYGMTVPLFSIGLDIMLIIISYTLILNTVFRIPSQNARRKALGTCGSHVCVILLFYTPSLFTFFAHRFGGHTIPRHHILFANLYVVVPPALNPIIYGVKTKQIQDRFFQLFSFTKACF

SEQ ID NO: 1787 - protein, 325 aa, Artificial Sequence
  Synthetic
MKVASSFHNDTNPQDVWYVLIGIPGLEDLHSWIAIPICSMYIVAVIGNVLLIFLIVTERSLHEPMYFFLSMLALADLLLSTATAPKMLAIFWFHSRGISFGSCVSQMFFIHFIFVAESAILLAMAFDRYVAICYPLRYTTILTSSVIGKIGTAAVVRSFLICFPFIFLVYRLLYCGKHIIPHSYCEHMGIARLACDNITVNIIYGLTMALLSTGLDILLIIISYTMILRTVFQIPSWAARYKALNTCGSHICVILLFYTPAFFSFFAHRFGKTVPRHIHILVANLYVVVPPMLNPIIYGVKTKQIQDRVVFLFSSVSTCQHDSRC

SEQ ID NO: 1788 - protein, 314 aa, Artificial Sequence
  Synthetic
MPTVNHSGTSHTVFHLLGIPGLQDQHMWISIPFFISYVTALLGNSLLIFIILTKRSLHEPMYLFLCMLAGADIVLSTCTIPQALAIFWFRAGDISLDRCITQLFFIHSTFISESGILLVMAFDHYIAICYPLRYTTILTNALIKKICVTVSLRSYGTIFPIIFLLKRLTFCQNNIIPHTFCEHIGLAKYACNDIRINIWYGFSILMSTVVLDVVLIFISYMLILHAVFHMPSPDACHKALNTFGSHVCIIILFYGSGIFTILTQRFGRHIPPCIHIPLANVCILAPPMLNPIIYGIKTKQIQEQVVQFLFIKQK

SEQ ID NO: 1789 - protein, 311 aa, Artificial Sequence
  Synthetic
MTTLNYTVVSHTVFHLLGIPGLEDQHMWISIPFFISYITALLGNSLLIFIILTRPSLHGPMYLFLCMLVGADIVLSTSTVPQALSIFWFHAGEISLDRCITQLFFIHSTFISESGILLVMAFDRYIAICYPLRYTTVLTNSLIGKIRVGIFLRSYGTIFPIIFLLKRLTFCKNNIIPHTYCEHIGLAKYACNSIRVNIWYGFSVLILTVVLDVVLIFVSYVLILRAVFRMPSQDARHKALNTCGSHVCIIILFYGPGIFTTLTQRFGRHIPPHIHILLANVCILAPPMLNPIIYGIKTKQIQEQMVHVLFT

SEQ ID NO: 1790 - protein, 314 aa, Artificial Sequence
  Synthetic
MGTVNHTDISHTVFHLLGIPGLEDQHMWISIPFFISYITALLGNSLLIFIILTRPSLHEPMYLFLCMLAGADIVLSTSTVPQALSIFWFHAGEISLDRCITQLFFIHSTFISESGILLVMAFDRYIAICYPLRYITVLTKSLIGKIGVGIFLRSYGTIFPIIFLLKRLTFCRTNILPHTACEHAGLSKYACNDLQVHIWYGFFVLMSTVNLDVVLIFVSYVLILRAVFHMPSQDARHKALNTCGSHVCVIILFYGPGIFSTLNHQFGYKISTGVHVLLANVCILAPPMLNPIIYGVKTKQIRDQVTHVLFLKVI

SEQ ID NO: 1791 - protein, 317 aa, Artificial Sequence
  Synthetic
KPLIMLLSNSSRLSQPSFLLVGIPGLEESQHWIALPLGILYLLALVGNVTILFIIWMDPSLHQSMYLFLSMLAAINLVLASSTAPKALAVLLVHAHEIGYIVCLIQMFFIHAFSSMESGVLVAMALDRYVAICHPLHHSTILHPGVIGRIGMVVLVRGLLLLIPFPILLGTLIFCQATIIGHAYCEHMAVVKLACSETTVNRAYGLTMALLVIGLDVLAIGVSYAHILQAVLKVPGSEARLKAFSTCGSHICVILVFYVPGIFSFLTHRFGHHVPHHVHVLLATRYLLMPPALNPLVYGVKTQQIRQRVLRVFTQKD

SEQ ID NO: 1792 - protein, 313 aa, Artificial Sequence
  Synthetic
MLLSNSSRLSQPSFLLVGIPGLEESQHWIALPLGILYLLALVGNVTILFIIWMDPSLHQSMYLFLSMLAAIDLVLASSTAPKALAVLLVHAHEIGYIVCLIQMFFIHAFSSMESGVLVAMALDCYVAICHPLHHSTILHPGVIGCIGMVVLVRGLLLLIPFPILLGKLIFCQATIIGHAYCEHMAVVKLACSETTVNRAYGLTMALLVIGLDVLAIGVSYAHILQAVLKVPGSEARLKAFSTCGSHICVILVFYVPGIFSFLTHRFGHHVPHHVHVLLATWYLLMPPALNPLVYGVKTQQIRQRVLRVFTQKD

SEQ ID NO: 1793 - protein, 307 aa, Artificial Sequence
  Synthetic
KSLIMALSNSSRLPQPSFFLVGIPGLEESQHWIALPLGILYLLALVGNVTILFIIWMDPSLHQPMYLFLSMLAAIDLVVASSTAPKALAVLLVRAQEIGYTVCLIQMFFTHAFSSMESGVLVAMALDRYVAICHPLHHSTILHPGVIGHIGMVVLVWGLLLLIPFLILLRKLIFCQATIIGHAYCEHMAVVKLACSETTVNRAYGLTVALLVVGLDVLAIGVSYAHILQAVLKVPGNEARLKAFSTCGSHVCVILVFYIPGMFSFLTHRFGHHVPHHVHVLLAILYRLVPPALNPLVYGVKTQKIHQ

SEQ ID NO: 1794 - protein, 303 aa, Artificial Sequence
  Synthetic
MALSNSSRLPQPSFFLVGIPGLEESQHWIALPLGILYLLALVGNVTILFIIWMDPSLHQPMYLFLSMLAAIDLVVASSTAPKALAVLLVRAQEIGYTVCLIQMFFTHAFSSMESGVLVAMALDRYVAICHPLHHSTILHPGVIGHIGMVVLVRGLLLLIPFLILLRKLIFCQATIIGHAYCEHMAVVKLACSETTVNRAYGLTVALLVVGLDVLAIGVSYAHILQAVLKVPGNEARLKAFSTCGSHVCVILVFYIPGMFSFLTHRFGHHVPHHVHVLLAILYRLVPPALNPLVYGVKTQKIHQ

SEQ ID NO: 1795 - protein, 315 aa, Artificial Sequence
  Synthetic
MALSNSSRQPQPPFFLVGVPGLEESQHWIALPLGILYLFALVGNVTIIFIIWTDSSLHQPMYLFLAMLAAIDLVLASSTAPKALTVLLAHAHEIGYIVCLTQMFFIHAFSSMESGILVAMALDRYVAICHPLRHSTILHPGIIGRIGLVVLVRGLVLLFPFPILLQNVVFCRATVISHAYCEHMAVVKLACSETTVNRAYGLSVALLVVGLDVLAIGISYALILQAVLKVPGGEARLKAFSTCGSHVCVILIFYVPGMFSFLTHRFGHHVPHHVHVLLATLYLLVPPALNPLVYGVKTRQIRQRVLRVFYTKASI

SEQ ID NO: 1796 - protein, 315 aa, Artificial Sequence; identical to SEQ ID NO: 1795
  Synthetic

SEQ ID NO: 1797 - protein, 317 aa, Artificial Sequence
  Synthetic
YSLMLASRNSSSHSTFFILLGIPGLENYQFWVAFPFCVMYIVAVTGNITILHIIRIDHTLHEPMYLFLAMLATTDLVLSSSTQPKMLAILWFHDHKIEYHACLIQVFFIHAFSSVESGVLMTMALDRYVAICFPLRHSSILTTSAVIKLGAVVMVRGLLWVSPFCFMVSRMPFCPNKIIPQSYCEHMAVLKLVCADTRVNRGYGLFVAFSVVGFDIIVISVSYVMILRAVLRLPSGEARLKAFGTCASHIGVILTLYIPALFTFLTHRFGHHVPRVVHIMFANVYLLVPPMLNPIIYGVRTKQIRDRVTRGFCVKGS

SEQ ID NO: 1798 - protein, 314 aa, Artificial Sequence
  Synthetic
MVASSNSSSHPLFFMLLGIPGLENYQFWIAFPFCVMYIVALTGNITILYIIRIDHTLHEPMYLFLALLAITDLVLSSSTQPKMLAILWFHSHEIEYNACLIQVFFIHAFSSVESGVLMTMALDRYVAICFPLRHSSILTTSVVIKLGAAVMVRGLLWVSPFCFMVSRMPFCPNKVIPQSYCEHMAVLKLVCADTRVNRGYGLFVAFSVVGFDIIVISVSYVMILRAVLRLPSGEARLKAFGTCASHVCVILAFYIPALFTFLTHRFGHHVPRVVHIMFANFYLLVPPMLNPIIYGVRTKQIRDRVIRGFRRKDP

SEQ ID NO: 1799 - protein, 314 aa, Artificial Sequence; identical to SEQ ID NO: 1798
  Synthetic

SEQ ID NO: 1800 - protein, 315 aa, Artificial Sequence
  Synthetic
MVLASGNSSSHPVSFILLGIPGLESFQLWIAFPFCATYAVAVVGNITLLHVIRIDHTLHEPMYLFLAMLAITDLVLSSSTQPKMLAIFWFHAHEIQYHACLIQVFFIHAFSSVESGVLMAMALDCYVAICFPLRHSSILTPSVVIKLGTIVMLRGLLWVSPFCFMVSRMPFCQHQAIPQSYCEHMAVLKLVCADTSISRGNGLFVAFSVAGFDMIVIGMSYVMILRAVLQLPSGEARLKAFSTRSSHICVILALYIPALFSFLTYRFGHDVPRVVHILFANLYLLIPPMLNPIIYGVRTKQIGDRVIQGCCGNIP

SEQ ID NO: 1801 - protein, 325 aa, Artificial Sequence
  Synthetic
LGHNMESPHHTDVDPSVFFLLGIPGLEQFHLWLSLPVCGLGTATIVGNITILVVVATEPVLHKPVYLFLCMLSTIDLAASVSTVPKLLAIFWCGAGHISASACLAHMFFIHAFCMMESTVLLAMAFDRYVAICHPLRYATILTDTIIAHIGVAAVVRGSLLMLPCPFFIGRLNFCQSHVILHTYCEHMAVVKLACGDTRPNRVYGLTAALLVIGVDLFCIGLSYALIAQAVLRLSSHEARSKALGTCGSHVCVILISYTPALFSFFTHRFGHHVPVHIHILLANVYLLLPPALNPVVYGVKTKQIRKRVVRVFQSGQGMGIKASE

SEQ ID NO: 1802 - protein, 325 aa, Artificial Sequence
  Synthetic
ISQTMESPNHTDLDPSIFFLLGIPGLEQFHMWLSLPVCCLGTATIVGNITILVVVATEPTLHRPVYLFLCMLSTIDLAASFSTVPKLLAILWCGAGHISASACLTQMFFIHAFCMMESTVLLAMAFDRYVAICHPLRYSTILTDTIIARIGVVAMMRGSLLMLPCPFLIGRLSFCQSHVIPHTYCEHMAVVKLACGDTRPNRVYGLTAALLVIGVDLFCIGLSYALIAQAVFRLSSQEARSKALGTCGSHVCVILISYTPALFSFFTHRFGHHVPLHIHILLANVYLLFPPALNPVVYGVKTREIRERVAKVFQWGQGTRLKISK

SEQ ID NO: 1803 - protein, 325 aa, Artificial Sequence; identical to SEQ ID NO: 1802
  Synthetic

SEQ ID NO: 1804 - protein, 314 aa, Artificial Sequence
  Synthetic
MQHTNHSHQNPSSFLLMGIPGLEASHFWIAFPFCSMYALAVLGNMAVLLVVRSEPSLHQPMYLFLCMLSTIDLILCTSTVPKLLALFWANAAEIAFGACATQMFFIHGFSAVESGILLSMAFDRYLAICRPLHYGSLLSSESVSKLGAAALLRGLGLMTPLTCLLARLSYCGRVVAHSYCEHMAVVKLACGGTQPNNIYGITAATLVVGTDSICIAISYALILRAVLGLSSKEARAKTFGTCGSHLGVILLFYTPGLFFYTQRFGQHVPRHVHILLADLYLVVPPMLNPIIYGMKTKQIRDGALRLLKRGPAQS

SEQ ID NO: 1805 - protein, 316 aa, Artificial Sequence
  Synthetic
MSTFHNVCSVPSSLWLTGIPGLETLHIWLSIPFGSMYLVAVVGNITILAVVRVERSLHQPMYFFLCMLAVIDLVLSTSTMPKLLAIFWFGAGHIGLDACLCQMFLIHCFATVESGIFLAMAFDRYVAICNPLRHSMVLTHTLVGRLGLAAVLRGVLYIGPLPLMIRRLPLYKTRVISHSYCEHMAVVALTCGDSRVNNVYGLSIGFLVLILDSAAIAASYVMIFRAVMGLATPEARLKALGTCGSHICAILIFYVPIAVSSLIHRFGHQVPPPIHTLLANFYLLIPPILNPIVYAVRTKQIRDRLLQILKTGTKIR

SEQ ID NO: 1806 - protein, 316 aa, Artificial Sequence
  Synthetic
MSTFHNVCSVPSSLWLTGIPGLETLHIWLSIPFGSMYLVAVVGNITILAVVRVERSLHQPMYFFLCMLAVIDLVLSTSTMPKLLAIFWFGAGHIGLDACLCQMFLIHCFATVESGIFLAMAFDRYVAICNPLRHSMVLTHTVVGRLGLAAVLRGVLYIGPLPLMIRRLPLYKTRVISHSYCEHMAVVALTCGDSRVNNVYGLSIGFLVLILDSAAIAASYVMIFRAVMGLATPEARLKTLGTCGSHICAILIFYVPIAVSSLIHRFGHQVPPPIHTLLANFYLLIPPILNPIVYAVRTKQIRDRLLQILKTGTKIR

SEQ ID NO: 1807 - protein, 316 aa, Artificial Sequence
  Synthetic
MLTFHNVCSVPSSFWLTGIPGLESLHVWLSIPFGSMYLVAVVGNVTILAVVKIERSLHQPMYFFLCMLAAIDLVLSTSTIPKLLGIFWFGACDIGLDACLGQMFLIHCFATVESGIFLAMAFDRYVAICNPLRHSMVLTYTVVGRLGLVSLLRGVLYIGPLPLMIRRLPLYKTHVISHSYCEHMAVVALTCGDSRVNNVYGLSIGFLVLILDSVAIAASYVMIFRAVMGLATPEARLKTLGTCASHLCAILIFYVPIAVSSLIHRFGQCVPPPVHTLLANFYLLIPPILNPIVYAVRTKQIRESLLQIPRIEMKIR

SEQ ID NO: 1808 - protein, 316 aa, Artificial Sequence
  Synthetic
MYPTACSVPSSFWLTGIPGLESLHMWLSIPFGSMYLVAVVGNITILAVVKTERSLHQPMYFFLCMLAVIDLVLSTSTMPKLLAIFWFGACSIGLDACLVQMFFVHCFATVESGIFLAMAFDRYVAICDPLHHTSVLTHAVVGRLGLAALLRGVFYIGPLPLLIRRLPFFRTQIIAHSYCEHMAVVTLACGDTKVNNLYGMGIGFLVLILDSIAITASYIMIFRAVLGLSTSDARFKTLGTCGSHICAILVFYIPIAVSSLTHRFGHNVPSHIHILLANFYLLIPPILNPVVYAVRTKQIRERLLHIIKSGTQHKDM

SEQ ID NO: 1809 - protein, 318 aa, Artificial Sequence
  Synthetic
MKRKLRNKSDVHPSTFILIGIPGLEAAHMWISIPFCMVYVLALMGNSSLLFIIKTDSSLHEPMYLFLCMLAVADLVVCTTAVPKLLSLFWFHDGEIRFEACLTQIFLIHSCSTMESGFFLAMAFDRYVAICNPLRHSAILTHTVTGGIGLAVVIRGIALLSPHPFLLRWLPYCKTNIISHTYCEFMALIKIACAETSIRRAYSLIVAFLTGGVDFILIICSYVLILNTVFHLPTKDARLKTLGTCGSHVCVILVSYTPAFFSFLTHRFGHKVAPQVHIFVANIYLLVPPMVNPIIYGVRTKKIRNRFLKVFRFSKHTN

SEQ ID NO: 1810 - protein, 318 aa, Artificial Sequence; identical to SEQ ID NO: 1809
  Synthetic

SEQ ID NO: 1811 - protein, 314 aa, Artificial Sequence
  Synthetic
MLTYNKTNVHPSTFILIGIPGLEAAHMWISIPFCMGYILALVGNSSLLFIIKTDSSLHEPMYLFLCMLAVADLVVCTTAVPKLLSLFWFHDGEIRFEACLTQVFLIHSCSTMESGFLVGMAFDRYVAICNPLRHSAILTRTVTGAMGLAIVLRGAAFLSLHPFLLRWLPYCKTNIISHTYCEFMALIKIACAETSIRRAYSLIVAFLTGGVDFILIICSYVLILNTVFHLPSKDARLKTLGTCGSHVCVILVFYTPAFFSFLTHRFGHKVAPHVHILVANMYLLVPPMLDPIIYGVRTKKIRDRFLKLFLFQRV

SEQ ID NO: 1812 - protein, 314 aa, Artificial Sequence
  Synthetic
MGPANKSQLSPSTFWLMGIPGLEHLHVWIGIPFCSMYMVALMGNVTILAVVRAERTLHEPMFLFLCMLSVTDLVLSTSTLPRMLCLFWMAAHDITFDACLAQMFFIHSFTAMESGFFLAMAIDRYVAICDPLRHATILTHSRIAVMGAVVVLRGVGFFSPHPVLLKQLPYCRTRIIAHTYCEFMAVVKLACLEIGATKRYSLGVAFGIGSCDCFFIAISYVLILRAVFRLPSREASLKALGTCGSHVCVIVVFYSTAGFTFLTHRFGHNVAPRTHILIANMYLLVPPFLNPIVYGVRTKKIRDYVLNTLKVKGS

SEQ ID NO: 1813 - protein, 314 aa, Artificial Sequence
  Synthetic
MGPANKSQLSPSTFWLMGIPGLEHLHVWIGIPFCSMYMVALMGNVTILAVVRAERTLHEPMFLFLCMLSVTDLVLSTSTLPRMLCLFWMEAHDITFDACLAQMFFIHSFTAMESGFFLAMAIDRYVAICDPLRHTTILTNSRIAKMGAVVVLRGVGFFSPHPILLKQLPYCRTRIIAHTYCEFMAVVKLACVDTGATKRYSLSVASVIGSCDGFFIALSYVLILRAVFRLPSREASLKALGTCGSHVCVILVFYSTAVFTFLTHRFGHNVAPQIHIFIANMYLLVPPFLNPIVYGIRTKKIREYVLSFLRVKFS

SEQ ID NO: 1814 - protein, 314 aa, Artificial Sequence
  Synthetic
MLPSNITSTHPAVFLLVGIPGLEHLHAWISIPFCFAYTLALLGNCTLLFIIQADAALHEPMYLFLAMLATIDLVLSSTTLPKMLAIFWFRDQEINFFACLVQMFFLHSFSIMESAVLLAMAFDRYVAICKPLHYTTVLTGSLITKIGMAAVARAVTLMTPLPFLLRRFHYCRGPVIAHCYCEHMAVVRLACGDTSFNNIYGIAVAMFIVVLDLLFVILSYVFILQAVLQLASQEARYKAFGTCVSHIGAILSTYTPVVISSVMHRVARHAAPRVHILLAIFYLLFPPMVNPIIYGVKTKQIREYVLSLFQRKNM

SEQ ID NO: 1815 - protein, 314 aa, Artificial Sequence; identical to SEQ ID NO: 1814
  Synthetic

SEQ ID NO: 1816 - protein, 314 aa, Artificial Sequence
  Synthetic
MSASNITLTHPTAFLLVGIPGLEHLHIWISIPFCLAYTLALLGNCTLLLIIQADAALHEPMYLFLAMLAAIDLVLSSSALPKMLAIFWFRDREINFFACLAQMFFLHSFSIMESAVLLAMAFDRYVAICKPLHYTKVLTGSLITKIGMAAVARAVTLMTPLPFLLRCFHYCRGPVIAHCYCEHMAVVRLACGDTSFNNIYGIAVAMFIVVLDLLLVILSYIFILQAVLLLASQEARYKAFGTCVSHIGAILAFYTTVVISSVMHRVARHAAPHVHILLANFYLLFPPMVNPIIYGVKTKQIRESILGVFPRKDM

SEQ ID NO: 1817 - protein, 314 aa, Artificial Sequence; identical to SEQ ID NO: 1816
  Synthetic

SEQ ID NO: 1818 - protein, 317 aa, Artificial Sequence
  Synthetic
MLVNNITSTHPVAFLLMGIPGLEHLHIWISIPFCSAYTLAVLGNCTLLFIIRVDAALHETMYLFLAMLAAIDLVLSSSTLPKMLSLFWFRDREINFHACLIQMFFLHSFAIMESAMLLAMAFDRYVAICKPLHYTTILTKPLIIKIGLAAVTRAVTLMTPLPFLLRRFHYCRGTVIAHCYCEHMAVVRLACGDTRFNNIYGIAVAMFIVVLDLLFVILSYIFILRAVLQLASQEARYKAFGTCVSHIGAILAFYTPVVISSVMHRVARRAAPHVHILLANFYLLFPPMVNPIIYGVKTKQIRERVLGLFLRKDLKGE

SEQ ID NO: 1819 - protein, 317 aa, Artificial Sequence
  Synthetic
MLVNNITSTHPVAFLLMGIPGLEHLHIWISIPFCSAYTLAVLGNCTLLFIIRVDAALHEPMYLFLAMLAAIDLVLSSSTLPKMLSLFWFRDREINFHACLIQMFFLHSFAIMESAMLLAMAFDRYVAICKPLHYTTILTKPLIIKIGLAAVTRAVTLMTPLPFLLRRFHYCRGTVIAHCYCEHMAVVRLACGDTRFNNIYGIAVAMFIVVLDLLFVILSYIFILRAVLQLASQEARYKAFGTCVSHIGAILAFYTPVVISSVMHRVARRAAPHVHILLANFYLLFPPMVNPIIYGVKTKQIRERVLGLFLRKDLKGE

SEQ ID NO: 1820 - protein, 312 aa, Artificial Sequence
  Synthetic
MPLNSLPPSFILNGIPGLERVHVWISLPLCTMYIIFLVGNLGLVYLIYYEESLHHPMYFFFHALSLIDLLTCTTTLPNALCIFWFSLKEINFNACLAQMFFVHGFTGVESGVLMLMALDRYVAICYPLRYATTLTNPIIAKAELATFLRGVLLMIPFPFLVKRLPFCQSNIISHTYCDHMSVVKLSCASIKVNVIYGLMVALLIGVFDICCISLSYTLILKAAISLSSSDARQKAFSTCTAHISAIIITYVPAFFTFFAHRFGHTIPPSLHIIVANLYLLLPPTLNPIVYGVKTKQIRKSVIKFFQGDKGAG

SEQ ID NO: 1821 - protein, 318 aa, Artificial Sequence
  Synthetic
NSLCWFPTIHVTPPSFILNGIPGLERVHVWISLPLCTMYIIFLVGNLGLVYLIYYEESLHHPMYFFFHALSLIDLLTCTTTLPNALCIFWFSLKEINFNACLAQMFFVHGFTGVESGVLMLMALDRYVAICYPLRYATTLTNPIIAKAELATFLRGVLLMIPFPFLVKRLPFCQSNIISHTYCDHMSVVKLSCASIKVNVIYGLMVALLIGVFDICCISLSYTLILKAAISLSSSDARQKAFSTCTAHISAIIITYVPAFFTFFAHRFGHTIPPSLHIIVANLYLLLPPTLNPIVYGVKTKQIRKSVIKFFQGDKGAG

SEQ ID NO: 1822 - protein, 316 aa, Artificial Sequence
  Synthetic
MLISNNSYEAPQSFILNGIPGLEAVHIWISLPLCTMYIISLVGNLGLVYLIYYEESLHRPMYFFLAMLSLIDLFTCTTTVPNALFIFWFKLKEINFTACLVQMFFVHGFTGVESGVLMLMALDRYVAICYPLRYATILTNPVIAKAGLATFLRGVLLMIPFPFLVKRLPFCRSNVISHTYCDHMSVVKLSCASIKINVIYGLMVALLIGVFDICCISVSYTMILRAVVSLSSADARQKAFSTCTAHISAIIITYVPAFFTFFTHRFGHTIPPSLHIIVANLYLLLPPTLNPIVYGMKTKQIRDSIIKFFHGEKGSR

SEQ ID NO: 1823 - protein, 318 aa, Artificial Sequence
  Synthetic
MSFLNGTSLTPASFILNGIPGLEDVHLWISFPLCTMYSIAITGNFGLMYLIYCDEALHRPMYVFLALLSFTDVLMCTSTLPNTLFILWFNLKEIDFKACLAQMFFVHTFTGMESGVLMLMALDHCVAICFPLRYATILTNSVIAKAGFLTFLRGVMLVIPSTFLTKRLPYCKGNVIPHTYCDHMSVAKISCGNVRVNAIYGLIVALLIGGFDILCITISYTMILQAVVSLSSADARQKAFSTCTAHFCAIVLTYVPAFFTFFTHGGHTIPLHIHIIMANLYLLMPPTMNPIVYGVKTRQVRESVIRFFLKGKDNSHNF

SEQ ID NO: 1824 - protein, 319 aa, Artificial Sequence
  Synthetic
MSFLNGTSLTPASFILNGIPGLEDVHLWISFPLCTMYSIAITGNFGLMYLIYCDEALHRPMYVFLALLSFTDVLMCTSTLPNTLFILWFNLKEIDFKACLAQMFFVHTFTGMESGVLMLMALDHCVAICFPLRYATILTNSVIAKAGFLTFLRGVMLVIPSTFLTKCLPYCKGNVIPHTYCDHMSVAKISCGNVRVNAIYGLIVALLIGGFDILCITISYTMILQAVVSLSSADARQKAFSTCTAHICAIVLTYVPAFFTFFTHHFGHTIPLHIHIIMANLYLLMPPTMNPIVYGVKTRQVRESVIRFFLKGKDNSHNY

SEQ ID NO: 1825 - protein, 317 aa, Artificial Sequence
  Synthetic
MSGANSSSLTPEFFILNGVPGLEDAHVWISLPFCFMYMIAVVGNCGLIYLIGHEEALHRPMYYFLALLSFTDVTLCTTTVPNMLCIFWFNFKKIGFNSCLVQMFFVHMLTGMESGVLMLMALDRYVAICYPLRYTTILTNPVIAKAGLATFLRSVMLIFPFTLLTKRLPYCRGSLIPHTYCDHMSVAKVSCGNAKVNAIYGLMVALLIGVFDICCISVSYTMILRAVVSLSSADARHKAFSTCTSHICAIVITYVPAFFTFFTHRFGHTIPHHVHIIVANLYLLLPPTMNPIVYGVKTKQIRESVIKFLLGDKMGIT

SEQ ID NO: 1826 - protein, 317 aa, Artificial Sequence
  Synthetic
MSGANSSSLTPEFFILNGVPGLEDAHVWISLPFCFMYMIAVVGNCGLIYLIGHEEALHRPMFYFLALLSFTDVTWCTTTVPNMLCIFWFNFKKIGFNSCLAQMFFVHMLTGMESGVLMLMALDRYVAICNPLRYTTILTNPVIAKACLATFLRSVMLIFPFTLLTKRLPYCRSILIPHTYCDHMSVAKVSCGNAKVNAIYGLMVALLIGVFDICCISVSYTMILRAVVSLSSADARHKAFSTCTSHICAIVITYVPAFFTFFTHRFGHTIPHHVHIIVANLYLLLPPTMNPIVYGVKTKQIRESVIKFLLGDKMGFT

SEQ ID NO: 1827 - protein, 320 aa, Artificial Sequence
  Synthetic
MSGDNSSSLTPGFFILNGVPGLEATHIWISLPFCFMYIIAVVGNCGLICLISHEEALHRPMYYFLALLSFTDVTLCTTMVPNMLCIFWFNLKEIDFNACLAQMFFVHMLTGMESGVLMLMALDRYVAICYPLRYATILTNPVIAKAGLATFLRNVMLIIPFTLLTKRLPYCRGNFIPHTYCDHMSVAKVSCGNFKVNAIYGLMVALLIGVFDICCISVSYTMILQAVMSLSSADARHKAFSTCTSHMCSIVITYVAAFFTFFTHRFVGHNIPNHHIIVANLYLLLPPTMNPIVYGVKTKQIQEGVIKFLLGDKVSFTYDK

SEQ ID NO: 1828 - protein, 307 aa, Artificial Sequence
  Synthetic
MVFRGLEDAHVWISLPFCFMYMIAVVGNCGLIYLIGHEEALHRPMYYFLTLLSFTDITLCTTTVPNMLCIFWFNLKKIGFKACLAQMFFVHTFTATESGMLMLMALDRYVAICYPLRYGTILTNPVIAKASLATFLRSVAFILPFTFLTKRLPYCRGNLIPHAYCDHMSVAKISCGNVKINAVYGLLVALVVCAFDIFCITVSYTMILRAVMNLSSADARHKAFSTCTSHICAIVITYVPAFFNFFTHRFGHTIPHHIHIIVANLYLLLPATMNPIVYGVKTKQIRESVIKFFSGDKSDIVDIKGLK

SEQ ID NO: 1829 - protein, 314 aa, Artificial Sequence
  Synthetic
MPGVNTSSLTPRYFILNGIPGLEAAHIWISLPFFIMYLIAVTGNCGLIYLISHEEALHRPMYYFLAMLSATDISGCNTIVPSMLCIFWFSVKEIDFNACLVQMFFIHMLTGMESGVLMLMALDRYVAICYPLRYTTILTNTMITKIGLAALVRSVLLMVPFAFLIKRLPYCRGNLIQHTYCDHMAVAKLSCGNIKINAIYGLIIAIFIGGFDIFCISMSYAMIIHAVVKLSSADARHKAFSTCTSHICAIVITYVPAFFNFFTHRRTTIPHHIHIIIANLYLLLPPTLNPIVYGVKTKQIREGVIKLFARQKVV

SEQ ID NO: 1830 - protein, 320 aa, Artificial Sequence
  Synthetic
MLTLNKTDLIPASFILNGVPGLEDTQLWISFPFCSMYVVAMVGNCGLLYLIHYEDALHKPMYYFLAMLSFTDLVMCSSTIPKALCIFWFHLKDIGFDECLVQMFFIHTFTGMESGVLMLMALDRYVAICYPLRYSTILTNPVIAKVGTATFLRGVLLIIPFTFLTKRLPYCRGNILPHTYCDHMSVAKLSCGNVKVNAIYGLMVALLIWGFDILCITISYTMILRAVVSLSSADARQKAFNTCTAHICAIVFSYTPAFFSFFSHRFGEHIIPPSHIIVANIYLLLPPTMNPIVYGVKTKQIRDCVIRILSGSKDTKSYSM

SEQ ID NO: 1831 - protein, 320 aa, Artificial Sequence
  Synthetic
MLTLNKTDLIPASFILNGVPGLEDTQLWISFPFCSMYVVAMVGNCGLLYLIHYEDALHKPMYYFLAMLSFTDLVMCSSTIPKALCIFWFHLKDIGFDECLVQMFFTHTFTGMESGVLMLMALDRYVAICYPLRYSTILTNPVIAKVGTATFLRGVLLIIPFTFLTKLLPYCRGNILPHTYCDHMSVAKLSCGNVKVNAIYGLMVALLIWGFDILCITNSYTMILRAVVSLSSADARQKAFNTCTAHICAIVFSYTPAFFSFFSHRFGEHIIPPSHIIVANIYLLLPPTMNPIVYGVKTKQIRDCVIRILSGSKDTKSYSM

SEQ ID NO: 1832 - protein, 322 aa, Artificial Sequence
  Synthetic
MVMSVQNSTDLTPASFVLNGIPGLEDMHIWISFPFCSMYAVAMMGNCGLLYLIFFEDSLHRPMYYFLAMLSLTDLVMCSSTIPKTLCIFWFHLKEIGFDDCLVQMFFIHTFTGMESGVLMLMALDRYVAICYPLRYSTILTNPIIAKIGLATFLRGVLLIIPFTFLTKRLPYCRGNIINHTYCDHMSVAKLSCGNVKVNAIYGLMVALLIGGFDILCITISYTMILRAVVSLSSADARQKAFSTCTAHICAIVFSYSPAFFSFFSHRFGHTIPPSCHIIVANIYLLLPPTMNPVVYGVKTKQIRDCVIRILSGSKDSKAHGI

SEQ ID NO: 1833 - protein, 322 aa, Artificial Sequence
  Synthetic
MVMSARNNPDLTPASFVLNGIPGLEHMHIWISFPFCSMYAVAMMGNCGLLYLIFFEDSLHRPMYYFLAMLSLTDLVMCSSTIPKALCIFWFHLKEIGFDDCLVQMFFIHTFMGMESGVLMLMALDHYVAICYPLHYSTILTNPIIAKIGLATFLRGVLLIIPFIFLSKCLPYFRGNIINHTYCDHMSVAKLPCGNVKVNAIYGLMVALLIGGFDILCITISYIMILRAVVSLSSADARQKAFSTCTAHICAIVFSYSPTFLSFFSHHFGHTIPPSCHIIVANIYLLLPPTMNPVVYGVKTKQIQDCVIRIFSESKDSKAHGI

SEQ ID NO: 1834 - protein, 320 aa, Artificial Sequence
  Synthetic
MLLLNQTEVTPVSFILNGIPGLEEMHIWISFPFCSMYVIAVVGNCGLLYLIFFEDSLHRSMYYFLAMLSLTDLVMCSASIPKTLCIFWFYIKEISFTDCLVQMFFIHTFTAMESGVLMLMALDRYVAICYPLHYSTILTNPVIAKAGLATFLRAVVLIIPLIFITKHLPFCRSNILIHTYCDQLSVAKVSCGNIKVNIVYGLMIALFIGGFDILCITVSYTMILKAVVSLSSADARQKAFSTCTAHICAIVFSYSPAFFCFFSHRFGGHIIPPSCIIVANLYLLLPPTMNPVVYGVKTKQIRDCVIRIFSGSKDIKSHSI

SEQ ID NO: 1835 - protein, 315 aa, Artificial Sequence
  Synthetic
MVGNITHQQIASFFLVGIPGLENVHCWIGISVCLLFVLTLLGNSIVIATIKLEPSLHQPMYFFLCMLAMNDMCLSSSAALKMLGIFWFDAHWINFDACLTQMYFIHTLCIMESAILVAMAFDRFVAICIPLHYASILTTSMVIKLGLVGLMRCVLMVLPCPILIKRLPYYTKYVIPHTYCEHMAVVKLASANTLINRAYGISVALSVITVDLGLIATSYVKILQSVFRLSSQNARSKALGTCAAHVCTILVSYIPALFSFLSHRIGKKVPPSVHIIFASMYLLVPSAVNPVVYGVKTKQIRDRVIDLFHKKFSEK

SEQ ID NO: 1836 - protein, 315 aa, Artificial Sequence; identical to SEQ ID NO: 1835
  Synthetic

SEQ ID NO: 1837 - protein, 316 aa, Artificial Sequence
  Synthetic
MVNDTTHHYISFFYLVGIPGFENFHYLISIPVCLLFVLTLLGNSIVIATIKLEPSLHQPMYFFLCMLAMNDILLTCSTSLKMLGIFWFNEHWIEFDVCLTQMYFIHTLCIFESAILVAMAFDRFVAICIPLHYATILTTAMVIKLGVVGLSRALLMVLPCPLLIKRLPYYTGYIIPHTYCEHMAVVKLASANTFINRAYGISAALSVITLDVWLIAASYIKILQAVFRLSSQNARSKALGTCAAHVCTILAFYTPALFSFLTHRIGKNVPPSVHIILASMYLLVPPTVNPLVYGVKTKQIRDRVLSLFSHLKIAEY

SEQ ID NO: 1838 - protein, 314 aa, Artificial Sequence
  Synthetic
MAGNATHHIASFFLVGIPGLENFHCWIGIPVCLLFALTLLGNSIILTTVKLEPSLHQPMYFFLCMLAMNDMCLTCSTALKMLGIFWFDEHWINFDACLTQMFFIHTLCIMESAILVAMAFDRFVAICIPLHYTSILTTPMVIKIGLVGLSRAILMIMPCPLLIKRLLYYTKYVIHHAYCEHMAVVKMASGNTQVNRIYGILVALSVTIFDLGLIVTSYIKILQAVFRLSSQNARSKALGTCVAHVCTILAFYTPALFSFLTHRFGKNVPASIHIIFAILYLLVSPTVNPLVYGAKTKQIRDRVVSLLFSQKQKF

SEQ ID NO: 1839 - protein, 311 aa, Artificial Sequence
  Synthetic
MSISNITVYMPSVLTLVGIPGLESVQCWIGIPFCAIYLIAMIGNSLLLSIIKSERSLHEPLYIFLGMLGATDIALASSIMPKMLGIFWFNVPEIYFDSCLLQMWFIHTLQGIESGILVAMALDRYVAICYPLRHANIFTHQLVIQIGTMVVLRAAILVAPCLVLIKRFQFYHTTVISHSYCEHMAIVKLAAANVQVNKIYGLFVAFTVAGFDLTFITLSYIQIFITVFRLPQKEARFKAFNTCIAHICVFLQFYLLAFFSFFTHRFGSHIPPYIHILFSSIYLLVPPFLNPLVYGAKTTQIRIHVVKMFCS

SEQ ID NO: 1840 - protein, 311 aa, Artificial Sequence
  Synthetic
MSISNITVYMPSVLTLVGIPGLESVQCWIGIPFCAIYLIAMIGNSLLLSIIKSERSLHEPLYIFLGMLGATDIALASSIMPKMLGIFWFNVPEIYFDSCLLQMWFIHTLQGIESGILVAMALDRYVAICYPLRHANIFTHQLVIQIGTMVVLRAAILVAPCLVLIKRFQFYHTTVISHSYCEHMAIVKLAAANVQVNKIYGLFVAFTVAGFDLTFITLSYIQIFITVFRLPQKEARFKAFNTCIAHICVFLQFYLLAFFSFFTHRFGSHISPYIHILFSSIYLLVPPFLNPLVYGAKTTQIRIHVVKMFCS

SEQ ID NO: 1841 - protein, 315 aa, Artificial Sequence
  Synthetic
MPHLNSTIFRPSVLTLTGIPGLESVQFWIGIPFCIMYIIALLGNSLLLVVIKVERSLHEPMYLFLAMLGATDISLSTSILPKMLGIFWFHLSTIYFDACLLQMWLIHTFQGIESGILFAMAMDRYVAICDPLRHASIFTQRLLTQIGVGVTLRAALFVAPCLFLIKRLKFYWTTVVSHSYCEHMAIVKLAAEDVHVNKIYGLFVAFSILGLDIIFITLSYIRIFITVFKLPQKEARLKAFNTCVAHICVFLEFYLLAFFSFFTHRFGYHVPSYIHILLSNLYLLVPPLLNPIVYGVKTKQIRDQVSKILYCNYSY

SEQ ID NO: 1842 - protein, 315 aa, Artificial Sequence
  Synthetic
MPHLNSTIFRPSVLTLTGIPGLESVQFWIGIPFCIMYIIALLGNSLLLVVIKVERSLHEPMYLFLAMLGATDISLSTSILPKMLGIFWFHLPTIYFDACLLQMWLIHTFQGIESGILFAMAMDRYVAICYPLRHASIFTQRLLTQIGVGVTLRAALFVAPCLFLIKRLKFYWTTVVSHSYCEHMAIVKLAAEDVHVNKIYGLFVAFSILGLDIIFITLSYIRIFITVFKLPQKEARLKAFNTCVAHICVFLEFYLLAFFSFFTHRFGYHVPSYIHILLSNLYLLVPPLLNPIVYGVKTKQIRDQVSKILYCNYSY

SEQ ID NO: 1843 - protein, 315 aa, Artificial Sequence
  Synthetic
MPHLNSTIFRPSVLTLTGIPGLESVQFWIGIPFCIMYIIALLGNSLLLVVIKVERSLHEPMYLFLAMLGATDIAISTCILPKMLGIFWFHLPTIYFDVCLLQMWLIHTFQCIESGILFAMAMDRYVAICDPLRHASIFTQRLLTQIGVGVTLRAALFVAPCLILIKRLKFYWTTVVSHSYCEHMAIVKLAAEDVHVNKIYGLFVAFSILGLDIIFITLSYIRIFITVFKLPQKEARLKAFNTCIAHICVFLEFYLLAFFSFFTHRFGYHVPSYIHILLSNLYLLVPPLLNPIVYGVKTKQIRDQVSKILYCNYSY

SEQ ID NO: 1844 - protein, 315 aa, Artificial Sequence
  Synthetic
MIKFNGSVFMPSVLTLVGIPGLESVQCWIGIPFCVMYIIAMIGNSLILVIIKSEKSLHIPMYIFLAILAVTDIALSTCILPKMLGIFWFHMPQISFDACLLQMELIHSFQATESGILLAMALDRYVAICNPLRHATIFSPQLTTCLGAGALLRSLITTFPLILLIKRLKYFRTTIISHSYCEHMAIVKLAAQDIRINKICGLLVAFAILGFDIVFITFSYVRIFITVFQLPQKEARFKAFNTCIAHICVFLQFYLLAFFSFFTHRFGAHIPPYVHILLSDLYLLVPPFLNPIVYGVKTKQIRDQVLKMLFSKKPL

SEQ ID NO: 1845 - protein, 315 aa, Artificial Sequence
  Synthetic
MPTFNGSVFMPSAFILIGIPGLESVQCWIGIPFSAMYLIGVIGNSLILVIIKYENSLHIPMYIFLAMLAATDIALNTCILPKMLGIFWFHLPEISFDACLFQMWLIHSFQAIESGILLAMALDRYVAICIPLRHATIFSQQFLTHIGLGVTLRAAILIIPSLGLIKCLKHYRTTVISHSYCEHMAIVKLATEDIRVNKIYGLFVAFAILGFDIIFITLSYVQIFITVFQLPQKEARFKAFNTCIAHICVFLQFYLLAFFSFFTHRFGSHIPPYIHILLSNLYLLVPPFLNPIVYGVKTKQIRDHIVKVFFFKKVT

SEQ ID NO: 1846 - protein, 315 aa, Artificial Sequence
  Synthetic
MGYTNLSYLNPGTVILIGIPGLEHVQFWIGFPFFVVCLVALLGNLFLLIIIPTERSLHQPMYIFLAVLAATDLGLCLAIAPKMLAIFWFGSCSMAFDACLTQLFFIHALQGMESGVLLAMAFDRYVAICDPLRHTAVLTPLFLLRVVLVVAIRATVLVGVLPILLKRLQWFHSVVIVHSYCEHMAVVKLAAEDVRINKSYGLFVAFAILGFDMIFVFISYILIFRAVFRLPQKEARSKAFNTCTAHIVVFLEFYILAFFSFFSHRFGHVSPYVHILLSTIYLLLPPALNPIVYGVKTKEIRKWVVQIFVLKSNTQ

SEQ ID NO: 1847 - protein, 315 aa, Artificial Sequence; identical to SEQ ID NO: 1846
  Synthetic

SEQ ID NO: 1848 - protein, 315 aa, Artificial Sequence
  Synthetic
MNTNNVTYLNPGTVILIGIPGLEHVQFWIGFPFFTVCLVALLGNIILLIIIPAERSLHQPMYIFLAVLAGTDIGLCAAIAPKMLAIFWFRAYSMAFDACLAQLFFIHTLQCMESGILLAMAFDRYIAICDPLRHTSILTPSILGRMIVVVVIRAVVLVGLLPILIKRLHHFWSIQIAHSYCEHMAVVKLAADDVQVNKICGLFVGFSILGFDMVFIIISYALIFQAVFRLKQKEARLKAFNTCTAHIFVFLEFYILAFFSFFSHRFGHVVPSTHILLSTIYLLLPPALNPIVYGVKNMVIRKRVAQIFFLDHAHQ

SEQ ID NO: 1849 - protein, 318 aa, Artificial Sequence
  Synthetic
MLSSLKTNNVTYLNPGTVILIGIPGLEHVQFWIGFPFFTVCLVALLGNIILLIIIPAEHSLHQPMYIFLAVLAATDIGLCAAIAPKMLAIFWFRAYSMAFDACLAQLFFIHTLQGMESGILLAMAFDRYIAICDPLRHTSILTPSILGRMIVVVVIRAVVLVGLLPILIKRLHHFRSIQIAHSYCEHMAVVKLAADDVQVNKICGLFVGFSVLGFDMVFIIISYALIFQAVFRLKQKEARLKAFNTCTAHIFVFLEFYILAFFSFFSHRGHVVPSTHILLSTIYLLLPPALNPIVYGVKNMVIRKRVAQIFFLDHAHQ

SEQ ID NO: 1850 - protein, 308 aa, Artificial Sequence
  Synthetic
MLIFNHSSFMTFTLLGVPGLESQHLWLSVPFTSMLLAILIGNGAILFLVITEPTLHTPMYLLLALLMVADLISTLALVPKVLCLFWFDDRVIAIYACFTQMFFIHGASVVRSALLVAMAFDRFVAVCEPLRYNTILSHSLVGRLGLVALAKGVILILPMPLLLQRLTFCHRVIPHTYCDHMAVVKMACSNTRPNRIYGLFVILLVVGLNLLLIGFSYVFILQSVVRLNSRDATFKALNTCSAHLFVILITYVPALFSSITHRIGHHIPPHAHIILANLYLLIPSVFNPIIYGIKMKEIRDRVAKCLCR

SEQ ID NO: 1851 - protein, 308 aa, Artificial Sequence
  Synthetic
MLIFNHSSFMTFTLLGVPGLESQHLWLSVPFTSMLLAILIGNGAILFLVITEPTLHTPMYLLLALLMVADLISTLALVPKVLCLFWFDDRVIAIYACFTQMFFIHGASVVRSALLVAMAFDRFVAVCEPLRYNTILSHSLVGRLGLVALAKGVILILPMPLLLQRLTFCHRVIPHTYCDHMAVVKMACSNTRPNRIYGLFVILLVVGLDLLLIGFSYVFILQSVVRLNSRDATFKALNTCSAHLFVILITYVPALFSSITHRIGHHIPPHAHIILANLYLLIPSVFNPIIYGIKMKEIRDRVAKCLCR

SEQ ID NO: 1852 - protein, 326 aa, Artificial Sequence
  Synthetic
SLLLPSGTNSTSHPSFFILQGIPGMEDKHKWISIPFSSMYFITVMGNCTILLTISMERSLHKPMFLLLFFLALTDLGMSTTTIPKVLCIFWFGQSQISYEGCLVQLFFIHSISAMQSSVLMTMAFDRYVAICKPLRYSTILSNSRIGLIGLASLVRAILFILPMPILLQRMPFHANRVIPTTYCEHMAVVKMVCVDTTFNRIYGLVVAMLVVGVDISAIASSYALILRAIMHLSSKEAHHKAVNTCTTHICVMLVSYTPSLFSFLTHRFGRGIPPHVHTILGNLYFLVPPMLNPIIYGVKTKEFRDKITKYLYRRKEPIIFSHNQK

SEQ ID NO: 1853 - protein, 315 aa, Artificial Sequence
  Synthetic
MIFSNNSHLLPHTFFLTGIPGLTAAHVWISLPFCFMFVLSLTGNAVLLSLIWIEHRLHQPMFLFLAMLSFVDLVLSLSTLPKMLAIFWFGATAISSYACLSQMFLIHAFSAMESGVLVAMALDRFVAICNPLHYATILTPEVVAKIGGLVALRGVGLTIFFPSLACRLSYCGSHTIAYTYCEHMSVVKLACGAITVDSLYAFAVAIFLGVGDMAFIAYSYGQIVKTVMRFPSPEARGKAGSTCTAHVCVILFFYGPGFLVVMQRFGSTASAAKVILANLYLLFPPALDPIVYGVKTKQIRECLFTIIGSKKIEPT

SEQ ID NO: 1854 - protein, 315 aa, Artificial Sequence; identical to SEQ ID NO: 1853
  Synthetic

SEQ ID NO: 1855 - protein, 320 aa, Artificial Sequence
  Synthetic
RMAESSQSNSTFQHPAFFILTGIPALGDGQAWLSLVFGLMYLLALLGNATLLTVIRIDSTLHQPMFLLLATLAATDLGLATSIAPELLAVLWLGPQPVQYTACLIQMFFVHALTAMESGVLLAMACDRAVAVGRPLHYPILVTKARVGYAVLALTLKVLAVIVPFPLLVVRFKHFHAKIIHHAYCAHMAVVELVVGNTWVNNMYGLALSLAVSGVDILGIAGSYGLIAHAVLRLPTQEARVKAFGTCSSHICVILAFYVPGLFSFLTHRFGHTVPKPVHILLSIIYLLLPPALNPLIYGVRTKQIRDRFLEMFKFRKKQF

SEQ ID NO: 1856 - protein, 320 aa, Artificial Sequence
  Synthetic
RMAESSQSNSTFQHPAFFILTGIPALGDGQAWLSLVFGLMYLLALLGNATLLTVIRIDSTLHQPMFLLLATLAATDLGLATSIAPELLAVLWLGPQPVQYTACLIQMFFVHALTAMESGVLLAMACDRAVAVGRPLHYPILVTKARVGYAVLALTLKVLAVIVPFPLLVVRFKHFHAKIIHHAYCAHMAVVELVVGNTWVNNMYGLALSLAVSGVDILGIAGSYGLIAHAVLRLPTQDARVKAFGTCSSHICVILAFYVPGLFSFLTHRFGHTVPKPVHILLSIIYLLLPPALNPLIYGVRTKQIRDRFLEMFKFRKKQF

SEQ ID NO: 1857 - protein, 319 aa, Artificial Sequence
  Synthetic
MAETLQLNSTFLHPNFFILTGFPGLGSAQTWLTLVFGPIYLLALLGNGALPAVVWIDSTLHQPMFLLLAILAATDLGLATSIAPGLLAVLWLGPRSVPYAVCLVQMFFVHALTAMESGVLLAMACDRAAAIGRPLHYPVLVTKACVGYAALALALKAVAIVVPFPLLVAKFEHFQAKTIGHTYCAHMAVVELVVGNTQATNLYGLALSLAISGMDILGITGSYGLIAHAVLQLPTREAHAKAFGTCSSHICVILAFYIPGLFSYLTHRFGHTVPKPVHILLSNIYLLLPPALNPLIYGARTKQIRDRLLETFTFRKSPL

SEQ ID NO: 1858 - protein, 317 aa, Artificial Sequence
  Synthetic
MSDVNTTSNWPTFSFIGIPGLEAAHMWISIPFCLLYLVALGGNVLLLLLVRAEQNLHEPQFYFLAMLALTDLGLSLSTMPSVLAIFWFDVHNVGLDACLTQMFFIHTLSSVESGVLVAMAFDRLVAICAPLTYTRILNHQTVLCLSGAALIRGATLLAPLPFFLRTFPFCGANILSHSYCYYPDMLNLACGDVTFSSVYGLVCVLCTFAVDVIFILVSYMKILGTVMKLGIQDRNWKSLQTCVCHLCTVLVFYLPLISLAVLHRYTQETSPILYTTMSNAYLLMTPLLNPLVYSLKSRQIQAALRKRFGVQRVVAGE

SEQ ID NO: 1859 - protein, 317 aa, Artificial Sequence
  Synthetic
MSDVNTTSNWPTFSFIGIPGLEAAHMWISIPFCLLYLVALGGNFLLLLLVRAEQNLHEPQFYFLAMLALTDLGLSLSTMPSVLAIFWFDVHDVGLDACLTQMFFIHTLSSVESGVLVAMAFDRLVAICAPLTYTRILNHQTVLCLSGAALIRGATLLAPLPFFLRTFPFCGANILSHSYCYYPDMLNLACGDVTFSSVYGLVCVLCTFAVDVIFILVSYMKILGTVMKLGIQDRNWKSLQTCVCHLCTVLVFYLPLISLAVLHRYTQETSPILYTTMSNAYLLMTPLLNPLVYSLKSRQIQAALHKRFGVQRVVAGE

SEQ ID NO: 1860 - protein, 318 aa, Artificial Sequence
  Synthetic
PTQIAPNSSTSMAPTFLLVGMPGLSGAPSWWTLPLIAVYLLSALGNGTILWIIALQPALHRPMHFFLFLLSVSDIGLVTALMPTLLGIALAGAHTVPASACLLQMVFIHVFSVMESSVLLAMSIDRALAICRPLHYPALLTNGVISKISLAISFRCLGLHLPLPFLLAYMPYCLPQVLTHSYCLHPDVARLACPEAWGAAYSLFVVLSAMGLDPLLIFFSYGLIGKVLQGVESREDRWKAGQTCAAHLSAVLLFYIPMILALINHPELPITQHTHTLLSYVHFLLPPLINPILYSVKMKEIRKRILNRLQPRKVGGAQ

SEQ ID NO: 1861 - protein, 320 aa, Artificial Sequence
  Synthetic
PLSAQDTSNISSLMAPTFLLVGLPGLEAAPSWWSVPLITIYLLSAFGNGTILWIIALEPTLHRPMYFFLFLLSVSDVGLATVLMPTLLGLAFADAHTVPASACLLQMFFIHVFSVMESSVLLAMAFDRAVAICRPLHYPVILTNGVISKIAVAIAFRCLSLHLPLPILLARMPYCRPQVLTHSYCLHPDMARLACPEAWGAVYSLVVVLSAMVLDPLLIFFSYGLIGRALQGVGSAEDRWKAGQTCAAHLSAVLLFYIPMILLALIDRFKLPLPPPAHTLLSYVHFLLPPLMNPVLYSVKMKEIREKILKRLLPTKVGCA

SEQ ID NO: 1862 - protein, 323 aa, Artificial Sequence
  Synthetic
MLGPAYNHTMETPASFLLVGIPGLQSSHLWLAISLSAMYITALLGNTLIVTAIWMDSTRHEPMYCFLCVLAAVDIVMASSVVPKMVSIFCSGDSSISFSACFTQMFFVHLATAVETGLLLTMAFDRYVAICKPLHYKRILTPQVMLGMSMAVTIRAVTFMTPLSWMMNHLPFCGSNVVVHSYCKHIALARLACADPVPSSLYSLIGSSLMVGSDVAFIAASYILILRAVFDLSSKTAQLKALSTCGSHVGVMALYYLPGMAIYAAWLGQDIVPLHTQVLLADLYVIIPATLNPIIYGMRTKQLLEGIWSYLMHFLFDHSNLGS

SEQ ID NO: 1863 - protein, 323 aa, Artificial Sequence
  Synthetic
MLGPAYNHTMETPASFLLVGIPGLQSSHLWLAISLSAMYIIALLGNTIIVTAIWMDSTRHEPMYCFLCVLAAVDIVMASSVVPKMVSIFCSGDSSISFSACFTQMFFVHLATAVETGLLLTMAFDRYVAICKPLHYKRILTPQVMLGMSMAITIRAIIAITPLSWMVSHLPFCGSNVVVHSYCEHIALARLACADPVPSSLYSLIGSSLMVGSDVAFIAASYILILKAVFGLSSKTAQLKALSTCGSHVGVMALYYLPGMAIYAAWLGQDVVPLHTQVLLADLYVIIPATLNPIIYGMRTKQLRERIWSYLMHVLFDHSNLGS

SEQ ID NO: 1864 - protein, 325 aa, Artificial Sequence
  Synthetic
LCINRKKVNHTMETPASFLLVGIPGLQSSHLWLAISLSAMYIIALLGNTIIVTAIWMDSTRHEPMYCFLCVLAAVDIVMASSVVPKMVSIFCSGDSSISFSACFTQMFFVHLATAVETGLLLTMAFDRYVAICKPLHYKRILMPQVMLGMSMAITIRAIIAITPLSWMVSHLPFCGSNVVVHSYCEHIALARLACADPVPSSLYSLIGSSLMVGSDVAFIAASYILILKAVFGLSSKTAQLKALSTCGSHVGVMALYYLPGMAIYAAWLGQDVVPLHTQVLLADLYVIIPATLNPIIYGMRTKQLRERIWSYLMHVLFDHSNLGS

SEQ ID NO: 1865 - protein, 323 aa, Artificial Sequence
  Synthetic
MLGPSYNHTMESPGTFFLLGIPGFQSSYLWLAISLSTMYSIALLGNMLIIIVICMDSTLQEPMYFFLCVLAAVDIVMASSVVPKMVSIFSSGDSSISFNACFTQMYFVHAATAVETGLLLAMAFDRYVAICKPLHYMRILTRHVMLGISVTITVRAVIFMTPLSWMLSHLPFCASNVVPHSYCEHMAVAKLACADPMPSSLYSLIFSSIIVGSDVAFISASYSLILKAVFGLSSRNAQWKALSTCGSHVGVMALYYLPGMAIYVAWLGQDRVPLHTQVLLADLYLIIPPTLNPIIYGIRTRQIRERIWSLLTHCFFSQCTQGS

SEQ ID NO: 1866 - protein, 323 aa, Artificial Sequence
  Synthetic
MLGPSYNHTMESPGTFFLLGIPGFQSSYLWLAISLSTMYSIAVLGNMLIIIVICMDSTLQEPMYFFLCVLAAVDIVMASSVVPKMVSIFSSGDSSISFNACFTQMYFVHAATAVETGLLLAMAFDRYVAICKPLHYMRILTRHVMLGISVTITVRAVIFMTPLSWMLSHLPFCASNVVPHSYCEHMAVAKLACADPMPSSLYSLIFSSIIVGSDVAFISASYSLILKAVFGLSSRNAQWKALSTCGSHVGVMALYYLPGMAIYVAWLGQDRVPLHTQVLLADLYLIIPPTLNPIIYGIRTRQIRERIWSLLTHCFFSQCTQGS

SEQ ID NO: 1867 - protein, 321 aa, Artificial Sequence
  Synthetic
MGTALHETNSSEVHVSEFILLGFPGIHEFQIWLSLPMALLYIVALGANLLILITIYLEPTLHQPMYQFLGILAAVDIGLATTSMPKILAILWFDAKTISLPECFAQIYAIHTFMCMESGVFLCMAIDRYVAICYPLQYPSIVTEAFVIKATLSMLLRNGLLTIPVPVLAAQRQYCSRNEIDHCLCSNLGVISLACDDITVNRFYQLALAWLVVGSDMILVYASYALIIRSVLRLNSTEAASKALSTCSSHLILIMFYYTAIVIVSVTHLAGRRVPLIPVLLNVMHIVIPPSLNPVVYALRTQELKVGFRKVFSLSEFVSRK

SEQ ID NO: 1868 - protein, 320 aa, Artificial Sequence
  Synthetic
MGTKHATNSSEFQVSEFILLGFPGIHEFQIWLSLPMALLYIIALGANFLILITIYLEPNLHQSMYQFLGILAVVDIGLATTSMPKILAILWFDAKTISLPECFAQIYAIHTFMSMESGVFLCMAIDRYVAICYPLQYPSIVTEAFVIKATLSMMLRSGLLTIPVPVLAAQRQYCSRNEIDHCLCSNLGVISLACDDITVNRNCQLTLAWLILGIDMILVCVSYALIIRSVLRLNSTEAVSKALSTCSSHLILIMFYYTAIVILSVTHLAGRRVPLIPVLLNVMHIVIPPSLNPMVYALRTQELKVGFRKVFDLSHYVSRK

SEQ ID NO: 1869 - protein, 318 aa, Artificial Sequence
  Synthetic
DTSTSVTYDSSLQISQFILMGLPGIHEWQHWLSLPLTLLYLLALGANLLIIITIQHETVLHEPMYHLLGILAVVDIGLATTIMPKILAIFWFDAKAISLPMCFAQIYAIHCFFCIESGIFLCMAVDRYIAICRPLQYPSIVTKAFVFKATGFIMLRNGLLTIPVPILAAQRHYCSRNEIEHCLCSNLGVISLACDDITVNKFYQLMLAWVLVGSDMALVFSSYAVILHSVLRLNSAEAMSKALSTCSSHLILILFHTGIIVLSVTHLAEKKIPLIPVFLNVLHNVIPPALNPLACALRMHKLRLGFQRLLGLGQDVSK

SEQ ID NO: 1870 - protein, 317 aa, Artificial Sequence
  Synthetic
TSTSVTYDSSLQISQFILMGLPGIHEWQHWLSLPLTLLYLLALGANLLIIITIQHETVLHEPMYHLLGILAVVDIGLATTIMPKILAIFWFDAKAISLPMCFAQIYAIHCFFCIESGIFLCMAVDRYIAICRPLQYPSIVTKAFVFKATGFIMLRNGLLTIPVPILAAQRHYCSRNEIEHCLCSNLGVISLACDDITVNKFYQLMLAWVLVGSDMALVFSSYAVILHSVLRLNSAEAMSKALSTCSSHLILILFHTGIIVLSVTHLAEKKIPLISVFLNVLHNVIPPALNPLACALRMHKLRLGFQRLLGLGQDVSK

SEQ ID NO: 1871 - protein, 319 aa, Artificial Sequence
  Synthetic
MSASLKAFNSSKSQVSEFILLGFPGIHSWQHWLSLPFTLLYLSAIGTNVLILIIICQDPSLKQPMYLFLGILSVVDMGLATTIMPKILAIFWFDAKVISLPECFAQIYAIHCFVGMESGIFLCMAFDRYVAICYPLRYSSIITNSLILKATLFMVLRNGLCVIPVPVLAAQRNYCSRNEIDHCLCSNLGVTSLACDDRRPNSICQLILAWVGMGSDLGLIILSYTLILRSVLRLNSAEAVSKALNTCSSHLILILFFYTVVVVISVTHLAETKATLIPVLLNVMHNIIPPSLNPIVYALRTRELRRGFQKVFCRSLQEK

SEQ ID NO: 1872 - protein, 318 aa, Artificial Sequence
  Synthetic
MSASLKDFNSSKFLVSEFILLGFPGIHSWQHWLSLPLTLLYLSAIGTNVLILIIICQDPSLKQPMYLFLGILSLVDMGLATTIMPKILAIFWFDAKVISLPECFAQIYAIHCFVSMESGICLCMAFDRYVAICYPLHYSSIITNSLIFKATLFMVLRNGFCVISVPVLASQWNYCSRNEIDHCLCSNLGITSLACDDRRPNSIFQLILAWVGMGSELGLIILSYTLLLRSVLRLNSAEAVSKALNTCSSHLILTLFYTVIVVISVTHLSETKATLIPVLLNVMHNITPPSLNPIVYALRTRQLRQGFQKVLCRSLQEK

SEQ ID NO: 1873 - protein, 320 aa, Artificial Sequence
  Synthetic
MSASLKISNSSKFQVSEFILLGFPGIHSWQHWLSLPLALLYLSALAANTLILIIIWQNPSLQQPMYIFLGILCMVDMGLATTIIPKILAIFWFDAKVISLPERFAQIYAIHFFVGMESGILLCMAFDRYVAICHPLRYPSIVTSSLILKATLFMVLRNGLFVTPVPVLAAQRDYCSKNEIEHCLCSNLGVTSLACDDRRPNSICQLVLAWLGMGSDLSLIILSYILILYSVLRLNSAEAAAKALSTCSSHLTLILFFYTIVVVISVTHLTEMKATLIPVLLNVLHNIIPPSLNPTVYALQTKELRAAFQKVLFALTKEIR

SEQ ID NO: 1874 - protein, 321 aa, Artificial Sequence
  Synthetic
MSASLKISNSSKFQVSEFILLGFPGIHSWQHWLSLPLALLYLSALAANTLILIIIWQNPSLQQPMYIFLGILCMVDMGLATTIIPKILAIFWFDAKVISLPECFAQIYAIHFFVGMESGILLCMAFDRYVAICHPLRYPSIVTSSLILKATLFMVLRNGLFVTPVPVLAAQRDYCSKNEIEHCLCSNLGVTSLACDDRRPNSICQLVLAWLGMGSDLSLIILSYILILYSVLRLNSAEAAAKALSTCSSHLTLILFFYTIVVVISVTHLTEMKATLIPVLLNVLHNIIPPSLNPTVYALQTKELRAAFQKVLFALTKEIRS

SEQ ID NO: 1875 - protein, 319 aa, Artificial Sequence
  Synthetic
MFQILRDSNSSRFQVSEFILMGFPGIHSWQHWLSLPLALLYVLALIANILIVTVIYQEASLHQPMYHFLGILAIVDVGLATTIMPKILAILWFNDNNISLPECFAQMYAIHCFVAMESGIFVCMAIDRYVAICKPLRYSSIVTESFVVKATVIMAIRNFVAPMSVPVLAAQRNYCFQNKIEHCLCSNLGVTSLACDDRKINSINQLFLAWTLMGSDLALIMISYALILRSVLRLNSAEAASKALSTCTSHLILIFFFYTVIVVISITHSVGIKIPLIPVLLNVLHNVIPPALNPMVYALKNKELKQGLYKVLRLDVKEG

SEQ ID NO: 1876 - protein, 325 aa, Artificial Sequence
  Synthetic
MFQILRDSSSSRFQVSEFILMGFPGIHSWQHWLSLPLALLYVLALIANILIVTFIYQEASLHQPMYHFLGILAIVDMGLATTIMPKILAILWFNAKAISFNECFAQMYAIHCFVAMESDIFVCMAIDRYVAIRRPLRYSSIVTESFVVKATVIMAFRNFVAPMSVPVLAAQRNYCSRNQINHCFCPNPGVTSLACDDRKIDSINQLFLAWAVMGSDLGLIIVSYALILPSVLRLNSPKAASQTLSTCTSHLILIFFFYTVIIVMPITHSAKMTVPVILLLLNVPHNVIPPALNPMVYALKNKELKEGFYLCSGWMPKEPKKGENS

SEQ ID NO: 1877 - protein, 295 aa, Artificial Sequence [sequence omitted]

SEQ ID NO: 1878 - protein, 312 aa, Artificial Sequence
  Synthetic
MASPSNDSTAPVSEFLLICFPNFQSWQHWLSLPLSLLFLLAMGANTTLLITIQLEASLHQPLYYLLSLLSLLDIVLCLTVIPKVLAIFWFDLRSISFPACFLQMFIMNSFLTMESCTFMVMAYDRYVAICHPLRYPSIITDQFVARAVVFVIARNAFVSLPVPMLSARLRYCAGNIIKNCICSNLSVSKLSCDDITFNQLYQFVAGWTLLGSDLILIVISYSFILKVVLRIKAEGAVAKALSTCGSHFILILFFSTVLLVLVITNLAKRIPPDVPILLNILHHLIPPALNPIVYGVRTKEIKQGIQNLLKRL

SEQ ID NO: 1879 - protein, 312 aa, Artificial Sequence
  Synthetic
MTLPSNNSTSPVFEFFLICFPSFQSWQHWLSLPLSLLFLLAMGANATLLITIYLEASLHQPLYYLLSLLSLLDIVLCLTVIPKVLAIFWFDLRSISFPACFLQVFIMNSFLTMESCTFMIMAYDRYVAICKPLQYSSIITDQFVARAAIFVVARNGLLTMPIPILSSRLRYCAGHIIKNCICTNVSVSKLSCDDITLNQSYQFVIGWTLLGSDLILIVLSYFFILKTVLRIKGEGDMAKALGTCGSHFILILFFTTVLLVLVITNLAKRIPPDVPILLNILHHLIPPALNPIVYGVRTKEIKQGIQNLLRRL

SEQ ID NO: 1880 - protein, 316 aa, Artificial Sequence
  Synthetic
RQHMEAQSNTSSILAPDFLLICFPNYQTWQHWLSLPLSLLFLLAMGANATLLITIRMEASLHEPMYYLLSLLSLLDIVLCLTVIPKVLAIFWFDNKSIGFSSCFLQMFVMNSFLTMESCTFMVMAYDRYVAICKPLQYPSIITDQFVVRAAIFVAARNGILTMPIPILSSQLRYCARIIRNCICTNMSVSKLSCDDITFNKLYQFVIGWTLLGSDLILIVLSYSFILKAVLRIKAEGAVAKALSTCGSHFILILFFSTVLLVLVITNLARERIPPDVPILLNILHHLIPPALNPIVYGVRTREIKQGIRNLLRRRL

SEQ ID NO: 1881 - protein, 315 aa, Artificial Sequence
  Synthetic
RQHMEAQSNTSSILAPDFLLICFPNYQTWQHWLSLPLSLLFLLAMGANATLLITIRMEASLHEPMYYLLSLLSLLDIVLCLTVIPKVLAIFWFDNKSIGFSSCFLQMFVMNSFLTMESCTFMVMAYDRYVAICKPLQYPSIITDQFVVRAAIFVAARNGILTMPIPILSSQLRYCARIIRNCICTNMSVSKLSCDDITFNKLYQFVIGWTLLGSDLILIVLSYSFILKAVLRIKAEGAVAKALSTCGSHFILILFFSTVLLVLVITNLAERIPPDVPILLNILHHLIPPALNPIVYGVRTREIKQGIRNLLRRRL

SEQ ID NO: 1882 - protein, 311 aa, Artificial Sequence
  Synthetic
MALSNDSEAPISEFLLICFPNYQTWQHWLSLPLSLLFLLAMGANATLLITIRLEASLHEPMYYLLSLLSLLDIVLCLTVIPKVLAIFWFDNKSIGFSSCFLQMFVMNSFLTMESCTFMVMAYDRYVAICKPLQYPTVITDQFVVRAAIFIISRNALISLPVPILSARLKYCAQNIIKNCICTNLSVSRLSCDDITLNKLYQLVAGWTLLGSDLILIVLSYSFIFRVVLRIKAEGAVAKALSTCGSHFILILFFSTVLLVLVITNLAERIPPDIPILLNILHHLIPPALNPIVYGVRTREIKQGIQNLLRRL

SEQ ID NO: 1883 - protein, 317 aa, Artificial Sequence
  Synthetic
IQPMASPSNSSTVPVSEFLLICFPNFQSWQHWLSLPLSLLFLLAMGANTTLLITIQLEASLHQPLYYLLSLLSLLDIVLCLTVIPKVLAIFWYDLRSISFPACFLQMFIMNSFLPMESCTFMVMAYDRYVAICHPLRYPSIITNQFVAKASVFIVVRNALLTAPIPILTSLLHYCGENVIENCICANLSVSRLSCDNFTLNRIYQFVAGWTLLGSDLFLIFLSYTFILRAVLRFKAEGAAVKALSTCGSHFILILFFSTILLVVVLTNVARKKVPMDILILLNVLHHLIPPALNPIVYGVRTKEIKQGIQKLLQRGR

SEQ ID NO: 1884 - protein, 313 aa, Artificial Sequence
  Synthetic
MASPSNSSTVPVSEFLLICFPNFQSWQHWLSLPLSLLFLLAMGANTTLLITIQLEASLHQPLYYLLSLLSLLDIVLCLTVIPKVLAIFWYDLRSISFPACFLQMFIMNSFLPMESCTFMVMAYDRYVAICHPLRYPSIITNQFVAKASVFIVVRNALLTAPIPILTSLLHYCGENVIENCICANLSVSRLSCDNFTLNRIYQFVAGWTLLGSDLFLIFLSYTFILRAVLRFKAEGAAVKALSTCGSHFILILFFSTILLVVVLTNVAKKVPMDILILLNVLHHLIPPALNPIVYGVRTKEIKQGIQKLLQRGR

SEQ ID NO: 1885 - protein, 312 aa, Artificial Sequence
  Synthetic
MTTHRNDTSTEASDFLLNCFVRSPSWQHWLSLPLSLLFLLAVGANTTLLMTIWLEASLHQPLYYLLSLLSLLDIVLCLTVIPKVLTIFWFDLRPISFPACFLQMYIMNCFLAMESCTFMVMAYDRYVAICHPLRYPSIITDHFVVKAAMFILTRNVLMTLPIPILSAQLRYCGRNVIENCICANMSVSRLSCDDVTINHLYQFAGGWTLLGSDLILIFLSYTFILRAVLRLKAEGAVAKALSTCGSHFMLILFFSTILLVFVLTAKKKVSPDVPVLLNVLHHVIPAALNPIIYGVRTQEIKQGMQRLLKKGC

SEQ ID NO: 1886 - protein, 313 aa, Artificial Sequence
  Synthetic
MTTHRNDTSTEASDFLLNCFVRSPSWQHWLSLPLSLLFLLAVGANTTLLTTIWLEASLHQPLYYLLSLLSLLDIVLCLTVIPKVLTIFWFDLRPISFPACFLQMYIMNCFLAMESCTFMVMAYDRYVAICHPLRYPSIITDHFVVKAAMFILTRNVLMTLPIPILSAQLRYCGRNVIENCICANMSVSRLSCDDVTINHLYQFAGGWTLLGSDLILIFLSYTFILRAVLRLKAEGAVAKALSTCGSHFMLILFFSTILLVFVLTHVAKKVSPDVPVLLNVLHHVIPAALNPIIYGVRTQEIKQGMQRLLKKGC

SEQ ID NO: 1887 - protein, 314 aa, Artificial Sequence
  Synthetic
MTAHKNDTNPTGVSDFLLNCFVRSPSWQLWLSLPLSLLFLLAMGANAILLITIRMEASLHEPMYYLLSLLSMLDIILCLTVIPKVLAIFWFDLRAIGFPACFLQMYIMNSFLAMESCTFMIMAFDRYIAICHPLRYPSIITDQFVVKAATFILVRNVLITLPIPILSARLHYCGRNVIENCICANMSVSRLSCNDVNVNRLYQFAIGWTLLGSDLFLIFLSYTLILRAVLRLKAEGAVAKALSTCGSHFILILFFSTILLVFILTHVARKVSSDVPILLNVLHHVIPAALNPIVYGVRTQEIKQGIKKLLKKGW

SEQ ID NO: 1888 - protein, 313 aa, Artificial Sequence
  Synthetic
MTAHKNDTNPTGVSDFLLNCFVRSPSWQLWLSLPLSLLFLLAMGANAILLITIRMEASLHEPMYYLLSLLSMLDIILCLTVIPKVLAIFWFDLRAIGFPACFLQMYIMNSFLAMESCTFMIMAFDRYIAICHPLRYPSIITDQFVVKAATFILVRNVLIPLPIPILSGRLHYCGRNVIENCICANMSVSRLSCDDVTVNRLYQFAGGWTLLGSDLVLIFLSYTLILRAVLRLKAEGAVAKALSTCGSHFILILFFSTILLVFILTAKRKVSSDVPILLNVLHHVIPAALNPIVYGVRTQEIKQGIKKLLKRGW

SEQ ID NO: 1889 - protein, 305 aa, Artificial Sequence
  Synthetic
MAMDNVTAVFQFLLIGISNYPQWRDTFFTLVLIIYLSTLLGNGFMIFLIHFDPNLHTPIYFFLSNLSFLDLCYGTASMPQALVHCFSTHPYLSYPRCLAQTSVSLALATAECLLLAAMAYDRVVAISNPLRYSVVMNGPVCVCLVATSWGTSLVLAMLILSLRLHFCGANVINHFACEILSLIKLTCSDTSLNEFMILITSIFTLLLPFGFVLLSYIRIAMAIIRIRSLQGRLKAFTTCGSHLTVVTIFYGSAISMYMKTQSKSYPDQDKFISVFYGALTPMLNPLIYSLRKKDVKRAIRKVMLK
